(19) United States
(12) Patent Application Publication
(10) Pub. No.: US 2014/0223606 A1
(43) Pub. Date: Aug. 7, 2014

(54) COMPOSITIONS AND METHODS COMPRISING SEQUENCES HAVING MEGANUCLEASE ACTIVITY

(71) Applicants: E I DU PONT DE NEMOURS AND COMPANY, (US); PIONEER HI BRED INTERNATIONAL INC, (US)

(72) Inventors: ERICKA BERMUDEZ, APTOS, CA (US); ANDREW MARK CIGAN, JOHNSTON, IA (US); JAMES ENGLISH, SAN RAMON, CA (US); SAVERIO CARL FALCO, WILMINGTON, DE (US); HUIRONG GAO, JOHNSTON, IA (US); LU LIU, PALO ALTO, CA (US); ZHAN-BIN LIU, WEST CHESTER, PA (US); AZALEA ONG, CASTRO VALLEY, CA (US); SERGEI SVITASHEV, JOHNSTON, IA (US); JOSHUA K. YOUNG, JOHNSTON, IA (US)

(73) Assignees: PIONEER HI BRED INTERNATIONAL INC, JOHNSTON, IA (US); E I DU PONT DE NEMOURS AND COMPANY, WILMINGTON, DE (US)

(21) Appl. No.: 13/886,317

(22) Filed: May 3, 2013

Related U.S. Application Data
(60) Provisional application No. 61/683,765, filed on Aug. 16, 2012.
(60) Provisional application No. 61/642,470, filed on May 4, 2012.

(51) Int. Cl. C12N 9/16

(52) U.S. Cl. CPC C12N 9/16
USPC 800/298; 536/23.2; 435/419; 435/196

(57) ABSTRACT

Compositions and methods comprising polynucleotides and polypeptides having meganuclease activity are provided. Further provided are nucleic acid constructs, yeast, plants, plant cells, explants, seeds and grain having the meganuclease sequences. Various methods of employing the meganuclease sequences are provided. Such methods include, for example, methods for producing a meganuclease with increased activity at a wide range of temperatures, methods for producing a yeast, plant, plant cell, explant or seed comprising a meganuclease with increased activity.

[0001] This application claims the benefit of U.S. Provisional Application No. 61/642,470, filed May, 04, 2012 and U.S. Provisional Application No. 61/683,765, filed Aug. 16, 2012; both of which are hereby incorporated herein in their entirety by reference.

### FIELD OF THE INVENTION

[0002] This invention is in the field of molecular biology. More specifically, this invention pertains to sequences having meganuclease activity.

### BACKGROUND OF THE INVENTION

[0003] Recombinant DNA technology has made it possible to insert foreign DNA sequences into the genome of an organism, thus, altering the organism's phenotype. The most commonly used plant transformation methods are Agrobacterium infection and biolistic particle bombardment in which transgenes integrate into a plant genome in a random fashion and in an unpredictable copy number. Thus, efforts are undertaken to control transgene integration in plants.

[0004] Site-specific integration techniques, which employ site-specific recombination systems, as well as, other types of recombination technologies, have been used to generate targeted insertions of genes of interest in a variety of organism.

[0005] Other methods for inserting or modifying a DNA sequence involve homologous DNA recombination by introducing a transgenic DNA sequence flanked by sequences homologous to the genomic target. U.S. Pat. No. 5,527,695 describes transforming eukaryotic cells with DNA sequences that are targeted to a predetermined sequence of the eukaryote's DNA. Transformed cells are identified through use of a selectable marker included as a part of the introduced DNA sequences.

[0006] While both systems have provided useful techniques for targeted insertion of sequences of interest, there remains a need for nucleases that will facilitate precise modification of a plant or yeast genome. In addition, there remains a need for meganucleases with increased activity that can introduce a double strand brake at a wide range of temperatures.

### BRIEF SUMMARY OF THE INVENTION

[0007] Compositions and methods comprising polynucleotides and polypeptides having meganuclease activity are provided. Further provided are compositions comprising polynucleotides encoding variant meganucleases comprising at least one amino acid modification, wherein the variant meganuclease has increased activity. Also provided are nucleic acid constructs, yeast, plants, plant cells, explants, seeds and grain having the meganuclease sequences.

[0008] Various methods of employing the meganuclease sequences are provided. Such methods include methods for increasing meganuclease activity in a cell, yeast cell, plant cell, plant, explant or seed. Further provided are methods and compositions that allow the various meganuclease polypeptides and variants and fragments thereof to be expressed in a yeast or plant cell at a wide range of temperatures. Such methods and compositions find use in producing yeast, plant cells, plants and explants with improved meganuclease activity.

[0009] Thus in a first embodiment, the invention concerns an isolated or recombinant polynucleotide comprising a nucleotide sequence encoding a meganuclease polypeptide, said polypeptide comprising: a) an amino acid sequence having at least one amino acid modification at an amino acid position corresponding to a position of SEQ ID NO:1 selected from the group consisting of positions 2, 12, 16, 22, 23, 31, 36, 43, 50, 56, 58, 59, 62, 71, 72, 73, 80, 81, 82, 86, 91, 95, 98, 103, 113, 114, 116, 117, 118, 121, 124, 128, 129, 131, 147, 151, 153, 159, 160, 161, 162, 163, 164, 165, 166, 167, 168, 169, 170, 171, 172, 173, 174, 175, 176, 177, 178, 179, 180, 182, 183, 184, 185, 186, 187, 188, 189, 190, 191, 192, 194, 195, 196, 197, 200, 203, 204, 209, 222, 232, 236, 237, 246, 254, 258, 267, 278, 281, 282, 289, 308, 311, 312, 316, 318, 319, 334, 339, 340, 342, 345, 346, 348 and combinations thereof; or, b) an amino acid sequence having at least 1, 2, 3, 4, 5, 6, 7, 8, 9, 10, 11, 12, 13, 14, 15, 16, 17, 18, 19, 20, 21, 22, 23, 24, 25, 26, 27, 28, 29, 30, 31, 32, 33, 34, 35, 36, 37, 38, 39, 40, 41, 42, 43 or 44 of any of the amino acid modification of (a).

[0010] In other embodiments, the invention concerns an isolated or recombinant polynucleotide of the present disclosure, wherein said nucleotide sequence encodes a meganuclease polypeptide having at least 80%, 81, %, 82%, 83%, 84%, 85%, 86%, 87%, 88%, 89%, 90%, 91%, 92%, 93%, 94%, 95%, 96%, 97%, 98%, 99% sequence identity to SEQ ID NO: 1.

[0011] In another embodiment, the invention concerns the isolated or recombinant polynucleotide of embodiment 1, and its corresponding polypeptide, wherein said at least one amino acid modification comprises; a) an aspartic acid (D) at a position corresponding to amino acid position 2 in SEQ ID NO: 1; b) a histidine (H) at a position corresponding to amino acid position 12 in SEQ ID NO: 1; c) an isoleucine (I) at a position corresponding to amino acid position 16 in SEQ ID NO: 1; d) a cysteine (C) at a position corresponding to amino acid position 22 in SEQ ID NO: 1; e) a leucine (L) at a position corresponding to amino acid position 23 in SEQ ID NO: 1; f) an arginine (R) at a position corresponding to amino acid position 31 in SEQ ID NO: 1; g) an asparagine (N) at a position corresponding to amino acid position 36 in SEQ ID NO: 1; h) a leucine (L) at a position corresponding to amino acid position 43 in SEQ ID NO: 1; i) an arginine (R) or lysine (K) at a position corresponding to amino acid position 50 in SEQ ID NO: 1; j) a leucine (L) at a position corresponding to amino acid position 56 in SEQ ID NO: 1; k) an isoleucine (I) at a position corresponding to amino acid position 58 in SEQ ID NO: 1; l) a histidine (H) or alanine (A) at a position corresponding to amino acid position 59 in SEQ ID NO: 1; m) a valine (V) at a position corresponding to amino acid position 62 in SEQ ID NO: 1; n) a lysine (K) at a position corresponding to amino acid position 71 in SEQ ID NO: 1; o) a threonine (T) at a position corresponding to amino acid position 72 in SEQ ID NO: 1; p) an alanine (A) at a position corresponding to amino acid position 73 in SEQ ID NO: 1; q) an arginine (R) at a position corresponding to amino acid position 80 in SEQ ID NO: 1; r) a lysine (K) at a position corresponding to amino acid position 81 in SEQ ID NO: 1; s) an arginine (R) at a position corresponding to amino acid position 82 in SEQ ID NO: 1; t) an aspartic acid (D) at a position corresponding to amino acid position 86 in SEQ ID NO: 1; u) an isoleucine (I) at a position corresponding to amino acid position 91 in SEQ ID NO: 1; v) an isoleucine (I) at a position corresponding to amino acid position 95 in SEQ ID NO: 1; w) an arginine (R) at a position corresponding to amino acid position 98 in SEQ ID NO: 1; x) a valine (V) at a position corresponding to amino acid position 103 in SEQ ID NO: 1; y) a serine (S) at a position corresponding to amino acid position 113 in SEQ ID NO: 1; z) a proline (P) at a position corresponding to amino acid position 114 in SEQ ID NO: 1; aa) an arginine (R) at a position corresponding to amino acid position 116 in SEQ ID NO: 1; bb) a glycine (G) at a position corresponding to amino acid position 117 in SEQ ID NO: 1; cc) a threonine (T) at a position corresponding to amino acid position 118 in SEQ ID NO: 1; dd) an glycine (G) at a position corresponding to amino acid position 121 in SEQ ID NO: 1; ee) an arginine (R) at a position corresponding to amino acid position 124 in SEQ ID NO: 1; ff) a cysteine (C) at a position corresponding to amino acid position 128 in SEQ ID NO: 1; gg) an alanine (A) at a position corresponding to amino acid position 129 in SEQ ID NO: 1; hh) an arginine (R) at a position corresponding to amino acid position 131 in SEQ ID NO: 1; ii) a serine (S) at a position corresponding to amino acid position 147 in SEQ ID NO: 1; jj) an alanine (A) at a position corresponding to amino acid position 151 in SEQ ID NO: 1; kk) a leucine (L) or a methionine (M) at a position corresponding to amino acid position 153 in SEQ ID NO: 1; ll) a tryptophan (W) at a position corresponding to amino acid position 159 in SEQ ID NO: 1; mm) a glutamic acid (E) at a position corresponding to amino acid position 160 in SEQ ID NO: 1; nn) a valine (V) at a position corresponding to amino acid position 161 in SEQ ID NO: 1; oo) a tyrosine (Y) at a position corresponding to amino acid position 162 in SEQ ID NO: 1; pp) an arginine (R) at a position corresponding to amino acid position 163 in SEQ ID NO: 1; qq) a histidine (H) at a position corresponding to amino acid position 164 in SEQ ID NO: 1; rr) a leucine (L) at a position corresponding to amino acid position 165 in SEQ ID NO: 1; ss) an arginine (R) at a position corresponding to amino acid position 166 in SEQ ID NO: 1; tt) a histidine (H) at a position corresponding to amino acid position 167 in SEQ ID NO: 1; uu) a proline (P) at a position corresponding to amino acid position 168 in SEQ ID NO: 1; vv) an alanine (A) at a position corresponding to amino acid position 169 in SEQ ID NO: 1; ww) a proline (P) at a position corresponding to amino acid position 170 in SEQ ID NO: 1; xx) a histidine (H) at a position corresponding to amino acid position 171 in SEQ ID NO: 1; yy) a proline (P) at a position corresponding to amino acid position 172 in SEQ ID NO: 1; zz) an arginine (R) at a position corresponding to amino acid position 173 in SEQ ID NO: 1; aaa) a leucine (L) at a position corresponding to amino acid position 174 in SEQ ID NO: 1; bbb) a proline (P) at a position corresponding to amino acid position 175 in SEQ ID NO: 1; ccc) a glutamine (Q) at a position corresponding to amino acid position 176 in SEQ ID NO: 1; ddd) an alanine (A) at a position corresponding to amino acid position 177 in SEQ ID NO: 1; eee) an arginine (R) at a position corresponding to amino acid position 178 in SEQ ID NO: 1; fff) a valine (V) at a position corresponding to amino acid position 179 in SEQ ID NO: 1; ggg) a glutamine (Q) at a position corresponding to amino acid position 180 in SEQ ID NO: 1; hhh) a valine (V) at a position corresponding to amino acid position 182 in SEQ ID NO: 1; iii) a proline (P) at a position corresponding to amino acid position 183 in SEQ ID NO: 1; jjj) a lysine (K) at a position corresponding to amino acid position 184 in SEQ ID NO: 1; kkk) a threonine (T) or a histidine (H) at a position corresponding to amino acid position 185 in SEQ ID NO: 1; lll) a serine (S) at a position corresponding to amino acid position 186 in SEQ ID NO: 1; mmm) a glutamic acid (E) at a position corresponding to amino acid position 187 in SEQ ID NO: 1; nnn) a leucine (L) at a position corresponding to amino acid position 188 in SEQ ID NO: 1; ooo) a glutamic acid (E) at a position corresponding to amino acid position 189 in SEQ ID NO: 1; ppp) a glutamine (Q) at a position corresponding to amino acid position 190 in SEQ ID NO: 1; qqq) a leucine (L) at a position corresponding to amino acid position 191 in SEQ ID NO: 1; rrr) a proline (P) at a position corresponding to amino acid position 194 in SEQ ID NO: 1; sss) a lysine (K) at a position corresponding to amino acid position 195 in SEQ ID NO: 1; ttt) a serine (S) at a position corresponding to amino acid position 196 in SEQ ID NO: 1; uuu) a phenylalanine (F) at a position corresponding to amino acid position 197 in SEQ ID NO: 1; vvv) an isoleucine (I) at a position corresponding to amino acid position 200 in SEQ ID NO: 1; www) a valine (V) at a position corresponding to amino acid position 203 in SEQ ID NO: 1; xxx) a leucine (L) at a position corresponding to amino acid position 204 in SEQ ID NO: 1; yyy) a cysteine (C) at a position corresponding to amino acid position 209 in SEQ ID NO: 1; zzz) a leucine (L) at a position corresponding to amino acid position 222 in SEQ ID NO: 1; aaaa) an isoleucine (I) at a position corresponding to amino acid position 232 in SEQ ID NO: 1; bbbb) a serine (S) at a position corresponding to amino acid position 236 in SEQ ID NO: 1; cccc) a leucine (L) or an arginine (R) at a position corresponding to amino acid position 237 in SEQ ID NO: 1; dddd) a histidine (H) at a position corresponding to amino acid position 246 in SEQ ID NO: 1; eeee) an isoleucine (I) at a position corresponding to amino acid position 254 in SEQ ID NO: 1; ffff) a serine (S) at a position corresponding to amino acid position 258 in SEQ ID NO: 1; gggg) an arginine (R) at a position corresponding to amino acid position 267 in SEQ ID NO: 1; hhhh) an isoleucine (I) at a position corresponding to amino acid position 278 in SEQ ID NO: 1; iiii) a tyrosine (Y) at a position corresponding to amino acid position 281 in SEQ ID NO: 1; jjjj) a phenylalanine (F) at a position corresponding to amino acid position 282 in SEQ ID NO: 1; kkkk) a threonine (T) at a position corresponding to amino acid position 289 in SEQ ID NO: 1; llll) a glycine (G) at a position corresponding to amino acid position 308 in SEQ ID NO: 1; mmmm) an arginine (R) at a position corresponding to amino acid position 311 in SEQ ID NO: 1; nnnn) an alanine (A) at a position corresponding to amino acid position 312 in SEQ ID NO: 1; oooo) an alanine (A) at a position corresponding to amino acid position 316 in SEQ ID NO: 1; pppp) an arginine (R) at a position corresponding to amino acid position 318 in SEQ ID NO: 1 qqqq) an alanine (A) at a position corresponding to amino acid position 334 in SEQ ID NO: 1; rrrr) a phenylalanine (F) at a position corresponding to amino acid position 339 in SEQ ID NO: 1; ssss) a glycine (G) or a leucine (L) at a position corresponding to amino acid position 340 in SEQ ID NO: 1; tttt) a serine (S) at a position corresponding to amino acid position 342 in SEQ ID NO: 1; uuuu) an asparagine (N) at a position corresponding to amino acid position 345 in SEQ ID NO: 1; vvvv) an asparagine (N) at a position corresponding to amino acid position 346 in SEQ ID NO: 1; wwww) an asparagine (N) at a position corresponding to amino acid position 348 in SEQ ID NO: 1; or, xxxx) any combination of a) to wwww).

[0012] In another embodiment, the invention concerns the isolated or recombinant polynucleotide of embodiment 1, and its corresponding polypeptide, wherein said nucleotide sequence encodes a meganuclease polypeptide, wherein said polypeptide further comprises at least one amino acid modification described herein such as those shown in FIG. 5A-FIG. 5E, FIG. 9A-FIG. 9N, FIG. 10A-FIG. 10D, FIG. 11, FIG. 12, FIG. 13, FIG. 14A-FIG. 14F and FIG. 15A-FIG. 15E as well any I-Cre1 type modification known and any combination thereof.

[0013] In another embodiment, the invention concerns an isolated or recombinant polynucleotide, and its corresponding polypeptide, wherein said nucleotide sequence encodes a meganuclease polypeptide selected from the group consisting of SEQ ID NOs: 14, 15, 16, 17, 18, 19, 20, 21, 22, 23, 24, 25, 26, 27, 28, 29, 30, 31, 32, 33, 34, 35, 36, 37, 38, 87, 88, 89, 90, 91, 92, 93, 94, 95, 96, 97, 98, 99, 100, 101, 102, 103, 104, 105, 106, 107, 108, 109, 110, 111, 112, 113, 114, 115, 116, 117, 118, 119, 120, 121, 122, 123, 124, 125, 126, 127, 128, 129, 130, 131, 132, 133, 134, 135, 136, 137, 138, 139, 140, 141, 142, 143, 144, 145, 146, 147, 148, 149, 150, 151, 152, 153, 154, 155, 156, 157, 158, 159, 160, 161, 162, 163, 164, 165, 166, 167, 251, 252, 253, 272, 273, 274, 275, 272, 273, 274, 275, 284, 285, 286, 287, 288, 289, 290, 291, 292, 293, 294, 295, 296, 297, 298, 330, 331, 332, 333, 334, 335, 336, 337, 338, 339, 340, 341, 357, 358, 359, 360, 361, 362, 363, 364, 365, 366, 367, 368, 369, 370, 371, 390, 391, 392, 393, 394, 395, 396, 397, 398, 399, 400, 401, 402, 403, 430, 431, 432 and 433.

[0014] In another embodiment, the invention concerns an isolated or recombinant polynucleotide of the present disclosure, and its corresponding polypeptide, wherein said nucleotide sequence encodes a meganuclease polypeptide, wherein the polypeptide is capable of recognizing and cleaving a meganuclease recognition sequence selected from the group consisting of SEQ ID NO: 2, SEQ ID NO: 85, SEQ ID NO:269, SEQ ID NO:281, SEQ ID NO: 331, SEQ ID NO:358, SEQ ID NO:390, SEQ ID NO:423 or SEQ ID NO:424.

[0015] In another embodiment, the invention concerns an isolated or recombinant polynucleotide of the present disclosure, and its corresponding polypeptide, wherein said nucleotide sequence encodes a meganuclease polypeptide, wherein said polypeptide has an increased meganuclease activity when compared to a control meganuclease that lacks said amino acid modification. The control meganuclease can be selected from the group of SEQ ID NO:1, SEQ ID NO: 86, SEQ ID NO: 250, SEQ ID NO:270, SEQ ID NO:271, SEQ ID NO:282, SEQ ID NO:283, SEQ ID NO: 329, SEQ ID NO:356, SEQ ID NO:389, SEQ ID NO:429 or SEQ ID NO:435 or any I-CreI type meganuclease. Increased meganuclease activity can be evidenced by any method for measuring meganuclease activity, including but not limited to a) a higher yeast assay score when compared to the control meganuclease that lacks said amino acid modification; or, b) a higher target site mutation rate when compared to the control meganuclease that lacks said amino acid modification; or, c) a higher in-vitro cutting when compared to the control meganuclease that lacks said amino acid modification; or, d) any combination of those methods. Furthermore, increased activity can be measured at a wide range of temperatures such as temperatures including 16° C., 24° C., 28° C., 30° C. or 37° C. and temperatures between 16° C. to 37° C.

[0016] In another embodiment, the invention concerns an isolated or recombinant polynucleotide, further comprising a nucleotide sequence encoding a N-terminal nuclear transit peptide and/or a nucleotide sequence encoding a C-terminal histidine tag.

[0017] In another embodiment, the invention concerns a recombinant DNA construct, comprising the isolated or recombinant polynucleotide of the present disclosure. The recombinant DNA construct can further comprise a promoter operably linked to said polynucleotide. The promoter can be heterologous with respect to the recombinant polynucleotide.

[0018] In another embodiment, the invention concerns a cell, plant cell, yeast cell, plant, yeast or seed comprising the recombinant construct of the present disclosure. The plant cell can be a monocot or a dicot plant cell. The monocot plant cell can be from maize, wheat, rice, barley, sugarcane, sorghum, or rye. The dicot cell can be a from soybean, Brassica, sunflower, cotton, or alfalfa.

[0019] In another embodiment, the invention concerns plants comprising the recombinant construct of the present disclosure and seeds or plant extracts, explant obtained from such plants.

[0020] In another embodiment, the invention concerns a method for producing a meganuclease having increased activity over a range of temperatures, the method comprising:
[0021] a) producing a variant meganuclease by modifying at least one amino acid at an amino acid position corresponding to a position of SEQ ID NO:1 selected from the group consisting of positions 2, 12, 16, 22, 23, 31, 36, 43, 50, 56, 58, 59, 62, 71, 72, 73, 80, 81, 82, 86, 91, 95, 98, 103, 113, 114, 116, 117, 118, 121, 124, 128, 129, 131, 147, 151, 153, 159, 160, 161, 162, 163, 164, 165, 166, 167, 168, 169, 170, 171, 172, 173, 174, 175, 176, 177, 178, 179, 180, 182, 183, 184, 185, 186, 187, 188, 189, 190, 191, 192, 194, 195, 196, 197, 200, 203, 204, 209, 222, 232, 236, 237, 246, 254, 258, 267, 278, 281, 282, 289, 308, 311, 312, 316, 318, 319, 334, 339, 340, 342, 345, 346 348 and combinations thereof; and,
[0022] b) selecting said variant meganuclease from step a) and screening said variant meganuclease for the ability to cleave a DNA target sequence over a range of temperatures between and including 16° C. to 37° C.

[0023] In another embodiment, the invention concerns a method for producing a meganuclease having an increased meganuclease activity when compared to a control meganuclease, the method comprising:
[0024] a) producing a variant meganuclease by modifying at least one amino acid at an amino acid position corresponding to a position of SEQ ID NO:1 selected from the group consisting of positions 2, 12, 16, 22, 23, 31, 36, 43, 50, 56, 58, 59, 62, 71, 72, 73, 80, 81, 82, 86, 91, 95, 98, 103, 113, 114, 116, 117, 118, 121, 124, 128, 129, 131, 147, 151, 153, 159, 160, 161, 162, 163, 164, 165, 166, 167, 168, 169, 170, 171, 172, 173, 174, 175, 176, 177, 178, 179, 180, 182, 183, 184, 185, 186, 187, 188, 189, 190, 191, 192, 194, 195, 196, 197, 200, 203, 204, 209, 222, 232, 236, 237, 246, 254, 258, 267, 278, 281, 282, 289, 308, 311, 312, 316, 318, 319, 334, 339, 340, 342, 345, 346, 348 and combinations thereof; and,
[0025] b) selecting the variant meganuclease from step a) and screening said variant for increased meganuclease activity when compared to a control meganuclease.
   In another embodiment, the invention concerns a method of introducing a double-strand break in the genome of a yeast or plant cell, said method comprising:

[0026] a) contacting at least one plant or yeast cell comprising in its genome a meganuclease recognition site with a variant meganuclease polypeptide selected from the group consisting of SEQ ID NOs: 14, 15, 16, 17, 18, 19, 20, 21, 22, 23, 24, 25, 26, 27, 28, 29, 30, 31, 32, 33, 34, 35, 36, 37, 38, 87, 88, 89, 90, 91, 92, 93, 94, 95, 96, 97, 98, 99, 100, 101, 102, 103, 104, 105, 106, 107, 108, 109, 110, 111, 112, 113, 114, 115, 116, 117, 118, 119, 120, 121, 122, 123, 124, 125, 126, 127, 128, 129, 130, 131, 132, 133, 134, 135, 136, 137, 138, 139, 140, 141, 142, 143, 144, 145, 146, 147, 148, 149, 150, 151, 152, 153, 154, 155, 156, 157, 158, 159, 160, 161, 162, 163, 164, 165, 166, 167, 251, 252, 253, 272, 273, 274, 275, 272, 273, 274, 275, 284, 285, 286, 287, 288, 289, 290, 291, 292, 293, 294, 295, 296, 297, 298, 330, 331, 332, 333, 334, 335, 336, 337, 338, 339, 340, 341, 357, 358, 359, 360, 361, 362, 363, 364, 365, 366, 367, 368, 369, 370, 371, 390, 391, 392, 393, 394, 395, 396, 397, 398, 399, 400, 401, 402 and 403, wherein the variant meganuclease is capable of inducing a double-strand break in said recognition site; and,

[0027] b) selecting the yeast or plant cell from a) and screening said yeast or plant cell for any modification of said recognition sequence.

[0028] In another embodiment, the invention concerns a method of integrating a polynucleotide of interest into a recognition site in the genome of a plant or yeast cell, the method comprising:

[0029] a) contacting at least one plant or yeast cell comprising in its genome a meganuclease recognition site with:
[0030] (i) a variant meganuclease polypeptide selected from the group consisting of SEQ ID NOs: 14, 15, 16, 17, 18, 19, 20, 21, 22, 23, 24, 25, 26, 27, 28, 29, 30, 31, 32, 33, 34, 35, 36, 37, 38, 87, 88, 89, 90, 91, 92, 93, 94, 95, 96, 97, 98, 99, 100, 101, 102, 103, 104, 105, 106, 107, 108, 109, 110, 111, 112, 113, 114, 115, 116, 117, 118, 119, 120, 121, 122, 123, 124, 125, 126, 127, 128, 129, 130, 131, 132, 133, 134, 135, 136, 137, 138, 139, 140, 141, 142, 143, 144, 145, 146, 147, 148, 149, 150, 151, 152, 153, 154, 155, 156, 157, 158, 159, 160, 161, 162, 163, 164, 165, 166, 167, 251, 252, 253, 272, 273, 274, 275, 272, 273, 274, 275, 284, 285, 286, 287, 288, 289, 290, 291, 292, 293, 294, 295, 296, 297, 298, 330, 331, 332, 333, 334, 335, 336, 337, 338, 339, 340, 341, 357, 358, 359, 360, 361, 362, 363, 364, 365, 366, 367, 368, 369, 370, 371, 390, 391, 392, 393, 394, 395, 396, 397, 398, 399, 400, 401, 402 and 403,
[0031] wherein the variant meganuclease is capable of inducing a double-strand break in said recognition site; and,
[0032] (ii) a DNA fragment containing a polynucleotide of interest;

[0033] b) selecting at least one plant or yeast cell comprising integration of the polynucleotide of interest cassette at the recognition site.

[0034] In another embodiment, the invention concerns an isolated or recombinant polynucleotide, and its corresponding polypeptide, encoding a meganuclease polypeptide, said polypeptide comprising an amino acid sequence having at least one amino acid modification at an amino acid position corresponding to a position of SEQ ID NO:1 selected from the group consisting of positions 16, 22, 50, 56, 59, 71, 81, 103, 121, 153, 185, 209, 222, 246, 258, 281, 308, 316, 345, 346, and combinations thereof, and wherein the polypeptide is capable of recognizing and cleaving a meganuclease target site comprising SEQ ID NO: 2.

[0035] In another embodiment, the invention concerns an isolated or recombinant polynucleotide encoding a meganuclease polypeptide, the polypeptide comprising an amino acid sequence having at least one amino acid modification at an amino acid position corresponding to a position of SEQ ID NO:86 selected from the group consisting of positions 2, 12, 16, 22, 23, 36, 43, 50, 56, 58, 59, 72, 73, 81, 86, 91, 95, 103, 113, 114, 120, 121, 124, 128, 129, 131, 151, 153, 200, 204, 209, 232, 236, 237, 246, 254, 258, 267, 281, 308, 311, 312, 316, 319, 334, 339, 340, 342, and combinations thereof, and wherein the polypeptide is capable of recognizing and cleaving a meganuclease target site comprising SEQ ID NO: 85.

[0036] In another embodiment, the invention concerns an isolated or recombinant polynucleotide encoding a meganuclease polypeptide, the polypeptide comprising an amino acid sequence having at least one amino acid modification at an amino acid position corresponding to a position of SEQ ID NO:270 selected from the group consisting of positions 16, 22, 50, 71, 185, 246, 258, 316 and combinations thereof, and wherein the polypeptide is capable of recognizing and cleaving a meganuclease target site comprising SEQ ID NO: 269.

[0037] In another embodiment, the invention concerns an isolated or recombinant polynucleotide encoding a meganuclease polypeptide, the polypeptide comprising an amino acid sequence having at least one amino acid modification at an amino acid position corresponding to a position of SEQ ID NO:329 selected from the group consisting of positions 12, 32, 50, 56, 80, 105, 124, 129, 131, 153, 185, 311, 316, 318, 340, and combinations thereof, and wherein the polypeptide is capable of recognizing and cleaving a meganuclease target site comprising SEQ ID NO: 328.

[0038] In another embodiment, the invention concerns an isolated or recombinant polynucleotide encoding a meganuclease polypeptide, the polypeptide comprising an amino acid sequence having at least one amino acid modification at an amino acid position corresponding to a position of SEQ ID NO:356 selected from the group consisting of positions 12, 24, 36, 50, 56, 62, 73, 80, 124, 129, 147, 182, 203, 237, 252, 311, 316, 318, 340, 348, and combinations thereof, and wherein the polypeptide is capable of recognizing and cleaving a meganuclease target site comprising SEQ ID NO: 355.

[0039] In another embodiment, the invention concerns an isolated or recombinant polynucleotide encoding a meganuclease polypeptide, the polypeptide comprising an amino acid sequence having at least one amino acid modification at an amino acid position corresponding to a position of SEQ ID NO:389 selected from the group consisting of positions 12, 50, 56, 124, 129, 131, 153, 211, 237, 311, 316, and position 318, and combinations thereof, and wherein the polypeptide is capable of recognizing and cleaving a meganuclease target site comprising SEQ ID NO: 388.

[0040] In another embodiment, the invention concerns An isolated or recombinant polynucleotide encoding a meganuclease polypeptide, the polypeptide comprising an amino acid sequence having at least one amino acid modification at an amino acid position corresponding to a position of SEQ ID NO:429 selected from the group consisting of positions 16, 22, 50, 71, 185, 246, 258, 316 and combinations thereof, and wherein the polypeptide is capable of recognizing and cleaving a meganuclease target site comprising SEQ ID NO: 423.

### BRIEF DESCRIPTION OF THE DRAWINGS AND SEQUENCE LISTING

[0041] The invention can be more fully understood from the following detailed description and the accompanying drawings and Sequence Listing, which form a part of this application. The sequence descriptions and sequence listing attached hereto comply with the rules governing nucleotide and amino acid sequence disclosures in patent applications as set forth in 37 C.F.R. §§1.821 1.825. The sequence descriptions contain the three letter codes for amino acids as defined in 37 C.F.R. §§1.821 1.825, which are incorporated herein by reference.

[0042] FIG. 1A-FIG. 1B show an amino acid alignment of I-CreI meganuclease (1-CreI.pro, SEQ ID NO: 3) with related meganucleases (SEQ ID NOs: 4-13) from various species. The decoration shows amino acid residues sharing identity.

[0043] FIG. 2 shows a diagram representing the yeast screening system used to determine the meganuclease activity in yeast. Gene fragments corresponding to the first 1000 nucleotides of the yeast Ade2 coding sequence (Ade2 5′ fragment) and the last 1011 nucleotides of the yeast Ade2 coding sequence (Ade2 3′ fragment) were disrupted by a fragment including the yeast ura3 gene (Ura3) and meganuclease recognition sites for I-SceI.

[0044] FIG. 3 shows the numerical scale and corresponding white sectoring of yeast colonies used to quantify meganuclease activity. Since the sectoring phenotype is a qualitative measure of meganuclease activity, a 0-4 numerical scoring system was implemented. A score of 0 indicates that no white sectors (no meganuclease cutting) were observed; a score of 4 indicates completely white colonies (complete cutting of the recognition site); scores of 1-3 indicate intermediate white sectoring phenotypes (and intermediate degrees of recognition site cutting).

[0045] FIG. 4 shows the meganuclease expression plasmid pVER8134.

[0046] FIG. 5A-FIG. 5E show an amino acid alignment of the parental LIG3-4 (LIG3-4.pro, SEQ ID NO: 1) and LIG3-4 meganuclease variants (Table 1A, SEQ ID NOs: 14-38). The name of the meganuclease listed in FIG. 5A-FIG. 5E corresponds to the name in Table 1A but include a “.pro” to indicate that this is a protein alignment.

[0047] FIG. 6A-FIG. 6C show the percent cleavage by the parental LIG3-4 and LIG3-4 variant meganucleases (B65=LIG3-4(B65); hit15=LIG3-4(15); hit7=LIG3-4(7)) of plasmid DNA substrate at 0, 25, 50 and 75 minutes averaged across three replicates of real-time PCR. FIG. 6A shows the % cleavage observed at 23° C. FIG. 6B shows the % cleavage observed at 28° C. FIG. 6C shows the % cleavage observed at 37° C.

[0048] FIG. 7A-FIG. 7C show the percent cleavage by the parental LIG3-4 and LIG3-4 variant meganucleases (B65=LIG3-4(B65); hit15=LIG3-4(15); hit7=LIG3-4(7)) of genomic DNA substrate at 50 minutes averaged across three replicates of real-time PCR. FIG. 7A shows the % cleavage observed at 23° C. FIG. 7B shows the % cleavage observed at 28° C. FIG. 7C shows the % cleavage observed at 37° C.

[0049] FIG. 8A shows a schematic outline of long fragment PCR reactions used to confirm UBI:moPAT:PinII cassette integration at the endogenous LIG3-4 recognition site. FIG. 8B: shows the results of long fragment PCR on callus from four events where integration occurred at the recognition site. The left panel of FIG. 8B shows the long junction fragment PCR on the HR1 side using genomic primer (HRR1) and moPAT primer (mopatR2); The right panel of FIG. 8B shows the long junction fragment PCR on HR2 side (mopatF2/HR2R2). Primer set mopatF2/HR2R2 amplified a 4 kb fragment, spanning from moPAT gene through the UBI intron, UBI promoter, and the HR2 sequence to the adjacent genomic region. Primer set HRR1/mopatR2 amplified a 2.2 kb fragment, spanning from the moPAT gene through the HR1 to the adjacent genomic region. The sizes of the two long PCR products indicate a perfect integration of the donor gene cassette at LIG3-4 recognition site. Insertion was obtained in T0 and T1 plants from one of the callus event.

[0050] FIG. 9A-FIG. 9N show an amino acid alignment of the parental MHP77 and MHP77 meganucleases variants. Amino acid modifications of the variant meganucleases, when compared to the parental meganuclease MHP77, are shown. A (−) indicates that the amino acid residue of the variant and parental meganuclease were identical.

[0051] FIG. 10A-FIG. 10D show an amino acid alignment of the parental MHP14 and MHP14 meganuclease variants. Amino acid modifications of the variant meganucleases, when compared to the parental meganuclease MHP14, are shown. A (−) indicates that the amino acid residue of the variant and parental meganuclease were identical.

[0052] FIG. 11 provides an amino acid alignment of the parental MHP107 and MHP107 meganucleases variants. Amino acid modifications of the variant meganucleases, when compared to the parental meganuclease, are shown. A (−) indicates that the amino acid residue of the variant and parental meganuclease were identical.

[0053] FIG. 12 provides an amino acid alignment of the parental ZM6.3 and ZM6.3 meganucleases variants. Amino acid modifications of the variant meganucleases, when compared to the parental meganuclease, are shown. A (−) indicates that the amino acid residue of the variant and parental meganuclease were identical.

[0054] FIG. 13 provides an amino acid alignment of the parental ZM6.22v2 and ZM6.22v2 meganucleases variants. Amino acid modifications of the variant meganucleases, when compared to the parental meganuclease, are shown. A (−) indicates that the amino acid residue of the variant and parental meganuclease were identical.

[0055] FIG. 14A-FIG. 14F show an amino acid alignment of the LIG3-4 meganuclease (SEQ ID NO:1) and multiple meganucleases. Amino acid modifications different from SEQ ID NO:1 are shown. A (−) indicates that the amino acid residue of the meganuclease is identical to the LIG3-4 meganuclease (SEQ ID NO:1). Highlighted in gray are mutations which were correlated with increased meganuclease activity on the desired target site.

[0056] FIG. 15A-FIG. 15D show an amino acid alignment of some meganucleases comprising a linker polypeptide that links the two re-engineered I-CreI monomers into a single amino chain. FIG. 15 E shows the percent identify of some variant (MHP14(10), MHP77(L9-01) and parental (LIG3-4, MHP14, MHP77) meganucleases.). Highlighted in gray are the novel linker sequences present in variants MHP14(10) and MHP77(L9-01).

[0057] FIG. 16 shows the structural motives of the meganuclease.

### SEQUENCES

[0058] SEQ ID NO: 1 is the amino acid sequence of the single chain LIG3-4 meganuclease fusion polypeptide.

[0059] SEQ ID NO: 2 is the nucleotide sequence of the LIG3-4 recognition sequence.

[0060] SEQ ID NO: 3 is the amino acid sequence of the I-CreI meganuclease monomer.

[0061] SEQ ID NO: 4 is the amino acid sequence of gi_{—}18654305

[0062] SEQ ID NO: 5 is the amino acid sequence of gi_{—}108773071

[0063] SEQ ID NO: 6 is the amino acid sequence of gi_{—}108773352

[0064] SEQ ID NO: 7 is the amino acid sequence of gi_{—}108796958

[0065] SEQ ID NO: 8 is the amino acid sequence of gi_{—}12667512

[0066] SEQ ID NO: 9 is the amino acid sequence of gi_{—}18654311

[0067] SEQ ID NO: 10 is the amino acid sequence of gi_{—}150406493

[0068] SEQ ID NO: 11 is the amino acid sequence of gi_{—}110225678

[0069] SEQ ID NO: 12 is the amino acid sequence of gi_{—}11467050

[0070] SEQ ID NO: 13 is the amino acid sequence of gi_{—}18654162

[0071] SEQ ID NO: 14 is the amino acid sequence of the LIG3-4 meganuclease.

TABLE 1A
Listing of SEQ ID NO: s (NT = nucleotide sequence; AA =
amino acid sequence) for parental and variant meganucleases.

| | | DNA for |
|---|---|---|
| | | expression |
| | AA | in yeast |
| Name | SEQ ID NO: | SEQ ID NO: |
| LIG3-4 | 1 | 40 |
| LIG3-4(B65) | 27 | 54 |
| LIG3-4(B70) | 28 | 55 |
| LIG3-4(B75) | 31 | 58 |
| LIG3-4(B76) | 32 | 59 |
| LIG3-4(B73) | 30 | 57 |
| LIG3-4(B82) | 34 | 61 |
| LIG3-4(B78) | 33 | 60 |
| LIG3-4(B1) | 18 | 45 |
| LIG3-4(15) | 15 | 42 |
| LIG3-4(D8) | 38 | 65 |
| LIG3-4(B15) | 19 | 46 |
| LIG3-4(C1) | 35 | 62 |
| LIG3-4(B71) | 29 | 56 |
| LIG3-4(B39) | 24 | 51 |
| LIG3-4(B16) | 20 | 47 |
| LIG3-4(D7) | 37 | 64 |
| LIG3-4(B38) | 23 | 50 |
| LIG3-4(B40) | 25 | 52 |
| LIG3-4(B36) | 22 | 49 |
| LIG3-4(B24) | 21 | 48 |
| LIG3-4(B55) | 26 | 53 |
| LIG3-4(A4) | 16 | 43 |
| LIG3-4(D5) | 36 | 63 |
| LIG3-4(7) | 14 | 41 |
| LIG3-4(A6) | 17 | 44 |
| MHP77 | 86 | 168 |
| MHP77(L72-01a) | 87 | 169 |
| MHP77(L72-08a) | 88 | 170 |
| MHP77(L72-09a) | 89 | 171 |
| MHP77(L73-02a) | 90 | 172 |
| MHP77(L73-05a) | 91 | 173 |
| MHP77(L9-01) | 92 | 174 |
| MHP77(L9-02) | 93 | 175 |
| MHP77(L9-03) | 94 | 176 |
| MHP77(L9-04) | 95 | 177 |
| MHP77(L9-06) | 96 | 178 |
| MHP77(L9-09) | 97 | 179 |
| MHP77(L9-10) | 98 | 180 |
| MHP77(L9-11) | 99 | 181 |
| MHP77(L9-12) | 100 | 182 |
| MHP77(L112-03a) | 101 | 183 |
| MHP77(L113-01) | 102 | 184 |
| MHP77(L13-01a) | 103 | 185 |
| MHP77(L13-02) | 104 | 186 |
| MHP77(L13-04) | 105 | 187 |
| MHP77(L13-06) | 106 | 188 |
| MHP77(L13-08a) | 107 | 189 |
| MHP77(L13-10B1) | 108 | 190 |
| MHP77(L13-11) | 109 | 191 |
| MHP77(L13-12) | 110 | 192 |
| MHP77(L15-02) | 111 | 193 |
| MHP77(L15-03) | 112 | 194 |
| MHP77(L15-05) | 113 | 195 |
| MHP77(L15-06) | 114 | 196 |
| MHP77(L15-08) | 115 | 197 |
| MHP77(L15-10) | 116 | 198 |
| MHP77(L15-11) | 117 | 199 |
| MHP77(L15-12) | 118 | 200 |
| MHP77(L15-13) | 119 | 201 |
| MHP77(L15-15) | 120 | 202 |
| MHP77(L15-16) | 121 | 203 |
| MHP77(L15-18) | 122 | 204 |
| MHP77(L15-20) | 123 | 205 |
| MHP77(L15-21) | 124 | 206 |
| MHP77(L15-23) | 125 | 207 |
| MHP77(L15-24) | 126 | 208 |
| MHP77(L15-28) | 127 | 209 |
| MHP77(L15-29) | 128 | 210 |
| MHP77(L15-33) | 129 | 211 |
| MHP77(L15-34) | 130 | 212 |
| MHP77(L15-35) | 131 | 213 |
| MHP77(L15-36) | 132 | 214 |
| MHP77(L15-39) | 133 | 215 |
| MHP77(L15-40) | 134 | 216 |
| MHP77(L15-41) | 135 | 217 |
| MHP77(L15-42) | 136 | 218 |
| MHP77(L15-43) | 137 | 219 |
| MHP77(L15-45) | 138 | 220 |
| MHP77(L15-46) | 139 | 221 |
| MHP77(L15-27) | 140 | 222 |
| MHP77(L15-30) | 141 | 223 |
| MHP77(L15-31) | 142 | 224 |
| MHP77(L15-47) | 143 | 225 |
| MHP77(L16-01) | 144 | 226 |
| MHP77(L16-02) | 145 | 227 |
| MHP77(L16-03) | 146 | 228 |
| MHP77(L16-04) | 147 | 229 |
| MHP77(L16-05) | 148 | 230 |
| MHP77(L16-06) | 149 | 231 |
| MHP77(L16-07) | 150 | 232 |
| MHP77(L16-08) | 151 | 233 |
| MHP77(L16-09) | 152 | 234 |
| MHP77(L16-11) | 153 | 235 |
| MHP77(L16-12) | 154 | 236 |
| MHP77(L16-14) | 155 | 237 |
| MHP77(L16-15) | 156 | 238 |
| MHP77(L16-16) | 157 | 239 |
| MHP77(L16-17) | 158 | 240 |
| MHP77(L16-18) | 159 | 241 |
| MHP77(L16-19) | 160 | 242 |
| MHP77(L16-21) | 161 | 243 |
| MHP77(L16-23) | 162 | 244 |
| MHP77(L16-24) | 163 | 245 |
| MHP77(L17-12) | 164 | 246 |
| MHP77(L18-01) | 165 | 247 |
| MHP77(L18-12) | 166 | 248 |
| MHP77(L17-01) | 167 | 249 |

[0072] SEQ ID NO: 39 is the plant optimized nucleotide sequence of LIG3-4 comprising a nuclear localization signal and an intron.

[0073] SEQ ID NO: 66 is the nucleotide sequence of MN031 primer.

[0074] SEQ ID NO: 67 is the nucleotide sequence of MN022 primer.

[0075] SEQ ID NO: 68 is the nucleotide sequence of plasmid pVER8134.

[0076] SEQ ID NO: 69 is the nucleotide sequence of a nuclear localization signal.

[0077] SEQ ID NO: 70 is the amino acid sequence of a nuclear localization signal.

[0078] SEQ ID NO: 71 is the amino acid sequence of 6× histidine tag.

[0079] SEQ ID NO: 72 is the nucleotide sequence of a nuclear localization signal in maize.

[0080] SEQ ID NO: 73 is the plant-optimized nucleotide sequence of the LIG3-4(7) meganuclease with a nuclear localization signal and an intron.

[0081] SEQ ID NO: 74 is the plant-optimized nucleotide sequence of the LIG3-4(15) meganuclease with a nuclear localization signal and an intron.

[0082] SEQ ID NO: 75 is the plant-optimized nucleotide sequence of the LIG3-4(B65) meganuclease with a nuclear localization signal and an intron.

[0083] SEQ ID NO: 76 is the nucleotide sequence of plasmid PHP46961.

[0084] SEQ ID NO: 77 is the nucleotide sequence of LIG3-4(HR1).

[0085] SEQ ID NO: 78 is the nucleotide sequence of LIG3-4(HR2).

[0086] SEQ ID NO: 79 is the nucleotide sequence of LIG3-4 target site qPCR probe.

[0087] SEQ ID NO: 80 is the nucleotide sequence of Lig3-4_forward primer.

[0088] SEQ ID NO: 81 is the nucleotide sequence of Lig3-4_reverse primer.

[0089] SEQ ID NO: 82 is the nucleotide sequence of yeast ade2.

[0090] SEQ ID NO: 83 is the nucleotide coding sequence of ade2.

[0091] SEQ ID NO: 84 is the nucleotide sequence of plasmid pHD1327.

[0092] SEQ ID NO: 85 is the nucleotide sequence the MHP77 recognition site.

[0093] SEQ ID NO: 86 is the amino acid sequence of the MHP77 meganuclease.

[0094] SEQ ID NO: 250 is the amino acid sequence of the MHP77.3 meganuclease.

[0095] SEQ ID NO: 251 is the amino acid sequence of the MHP77.3 (L9-02) meganuclease.

[0096] SEQ ID NO: 252 is the amino acid sequence of the MHP77.3 (L9-11) meganuclease.

[0097] SEQ ID NO: 253 is the amino acid sequence of the MHP77.3 (L9-12) meganuclease.

[0098] SEQ ID NO: 254 is the plant-optimized nucleotide sequence of MHP77 comprising a nuclear localization signal and lacking an intron.

[0099] SEQ ID NO: 255 is the plant-optimized nucleotide sequence of MHP77.3 meganuclease MHP77 comprising a nuclear localization signal and lacking an intron.

[0100] SEQ ID NO: 256 is the plant-optimized nucleotide sequence of MHP77(L9-02) meganuclease comprising a nuclear localization signal and an intron.

[0101] SEQ ID NO: 257 is the plant-optimized nucleotide sequence of the MHP77 (L9-11) meganuclease comprising a nuclear localization signal and an intron.

[0102] SEQ ID NO: 258 is the plant-optimized nucleotide sequence of the MHP77 (L9-12) meganuclease comprising a nuclear localization signal and an intron

[0103] SEQ ID NO: 259 is the plant-optimized nucleotide sequence of MHP77.3 (L9-02) meganuclease comprising a nuclear localization signal and an intron.

[0104] SEQ ID NO:260 is the plant-optimized nucleotide sequence of the MHP77.3 (L9-11) meganuclease comprising a nuclear localization signal and an intron.

[0105] SEQ ID NO:261 is the plant-optimized nucleotide sequence of the MHP77.3 (L9-12) meganuclease comprising a nuclear localization signal and an intron

[0106] SEQ ID NO:262 is the amino acid sequence of the MHP77.3(15) meganuclease.

[0107] SEQ ID NO:263 is the plant-optimized nucleotide sequence of MHP77.3(15) meganuclease comprising a nuclear localization signal and an intron.

[0108] SEQ ID NO:264 is the nucleotide sequence of the MHP77HR1.

[0109] SEQ ID NO:265 is the nucleotide sequence of the MHP77HR2.

[0110] SEQ ID NO:266 is the nucleotide sequence of the MHP77 target site qPCR probe.

[0111] SEQ ID NO:267 is the nucleotide sequence of the MHP77_forward primer.

[0112] SEQ ID NO:268 is the nucleotide sequence of the MHP77_reverse primer.

[0113] SEQ ID NO:269 is the nucleotide sequence of the MS26 recognition site.

[0114] SEQ ID NO:270 is the amino acid sequence of the MS26+ meganuclease.

[0115] SEQ ID NO:271 is the amino acid sequence of the MS26++ meganuclease.

[0116] SEQ ID NO:272 is the amino acid sequence of the MS26+(7) meganuclease.

[0117] SEQ ID NO:273 is the amino acid sequence of the MS26+(15) meganuclease.

[0118] SEQ ID NO:274 is the amino acid sequence of the MS26+(B65) meganuclease.

[0119] SEQ ID NO:275 is the amino acid sequence of the MS26++(15) meganuclease.

[0120] SEQ ID NO:276 is the plant-optimized nucleotide sequence of MS26+ and no intron

[0121] SEQ ID NO:419 is the plant-optimized nucleotide sequence of MS26+(7) and no intron

[0122] SEQ ID NO:277 is the plant-optimized nucleotide sequence of MS26+(15) and no intron

[0123] SEQ ID NO:278 is the plant-optimized nucleotide sequence of MS26+(B65) and no intron;

[0124] SEQ ID NO:279 is the plant-optimized nucleotide sequence of MS26++ and no intron

[0125] SEQ ID NO:280 is the plant-optimized nucleotide sequence of MS26++(15) and no intron

[0126] SEQ ID NO:281 is the nucleotide sequence of the MHP14 recognition site.

TABLE 1B
Listing of SEQ ID NO: s (NT = nucleotide sequence; AA =
amino acid sequence) for parental and variant meganucleases.

| | | DNA for |
|---|---|---|
| | | expression |
| | AA | in yeast |
| Name | SEQ ID NO: | SEQ ID NO: |
| MHP14 | 282 | 299 |
| MHP14+ | 283 | |
| MHP14(01) | 284 | 300 |
| MHP14(02) | 285 | 301 |
| MHP14(03) | 286 | 302 |
| MHP14(04) | 287 | 303 |
| MHP14(06) | 288 | 304 |
| MHP14(07) | 289 | 305 |
| MHP14(08) | 290 | 306 |
| MHP14(09) | 291 | 307 |
| MHP14(10) | 292 | 308 |
| MHP14(12) | 293 | 309 |
| MHP14(13) | 294 | 310 |
| MHP14(14) | 295 | 311 |
| MHP14(L14-03) | 296 | 312 |
| MHP14(L14-04) | 297 | 313 |
| MHP14(L14-07) | 298 | 314 |

[0127] SEQ ID NO:315 is the amino acid sequence of the MHP14+(04) meganuclease.

[0128] SEQ ID NO: 316 is the amino acid sequence of the MHP14+(06) meganuclease.

[0129] SEQ ID NO: 317 is the amino acid sequence of the MHP14+(08) meganuclease.

[0130] SEQ ID NO: 318 is the amino acid sequence of the MHP14+(12) meganuclease.

[0131] SEQ ID NO: 319 is the amino acid sequence of the MHP14+(14) meganuclease.

[0132] SEQ ID NO:320 is the amino acid sequence of the MHP14+(15) meganuclease.

[0133] SEQ ID NO:321 is the plant-optimized nucleotide sequence of MHP14 and an intron.

[0134] SEQ ID NO:322 is the plant-optimized nucleotide sequence of MHP14+(04) and an intron.

[0135] SEQ ID NO:323 is the plant-optimized nucleotide sequence of MHP14+(06) and an intron.

[0136] SEQ ID NO:324 is the plant-optimized nucleotide sequence of MHP14+(08) and an intron.

[0137] SEQ ID NO:325 is the plant-optimized nucleotide sequence of MHP14+(12) and an intron.

[0138] SEQ ID NO:326 is the plant-optimized nucleotide sequence of MHP14+(14) and an intron.

[0139] SEQ ID NO:327 is the plant-optimized nucleotide sequence of MHP14+(15) and an intron.

[0140] SEQ ID NO:328 is the nucleotide sequence of the MHP107 recognition site.

TABLE 1C
Listing of SEQ ID NO: s (NT = nucleotide sequence; AA =
amino acid sequence) for parental and variant meganucleases.

| | | DNA for |
|---|---|---|
| | | expression |
| | AA | in yeast |
| Name | SEQ ID NO: | SEQ ID NO: |
| MHP107 | 329 | 342 |
| MHP107(C1) | 330 | 343 |
| MHP107(C2) | 331 | 344 |
| MHP107(C3) | 332 | 345 |
| MHP107(C4) | 333 | 346 |
| MHP107(C5) | 334 | 347 |
| MHP107(C6) | 335 | 348 |
| MHP107(D2) | 336 | 349 |
| MHP107(D3) | 337 | 350 |
| MHP107(D4) | 338 | 351 |
| MHP107(D5) | 339 | 352 |
| MHP107(D1) | 340 | 353 |
| MHP107(D6) | 341 | 354 |

[0141] SEQ ID NO:355 is the nucleotide sequence of the ZM6.3 recognition site.

TABLE 1D
Listing of SEQ ID NO: s (NT = nucleotide sequence; AA =
amino acid sequence) for parental and variant meganucleases.

| | | DNA for |
|---|---|---|
| | | expression |
| | AA | in yeast |
| Name | SEQ ID NO: | SEQ ID NO: |
| ZM6.3 | 356 | 372 |
| ZM6.3(G1) | 357 | 373 |
| ZM6.3(G2) | 358 | 374 |
| ZM6.3(G3) | 359 | 375 |
| ZM6.3(G4) | 360 | 376 |
| ZM6.3(G5) | 361 | 377 |
| ZM6.3(G6) | 362 | 378 |
| ZM6.3(H1) | 363 | 379 |
| ZM6.3(H2) | 364 | 380 |
| ZM6.3(H3) | 365 | 381 |
| ZM6.3(H5) | 366 | 382 |
| ZM6.3(H6) | 367 | 383 |
| ZM6.3(1) | 368 | 384 |
| ZM6.3(3) | 369 | 385 |
| ZM6.3(4) | 370 | 386 |
| ZM6.3(5) | 371 | 387 |

[0142] SEQ ID NO:388 is the nucleotide sequence of the ZM6.22v2 recognition site.

TABLE 1E
Listing of SEQ ID NO: s (NT = nucleotide sequence; AA =
amino acid sequence) for parental and variant meganucleases.

| | | DNA for |
|---|---|---|
| | | expression |
| | AA | in yeast |
| Name | SEQ ID NO: | SEQ ID NO: |
| ZM6.22v2 | 389 | 404 |
| ZM6.22v2(J2) | 390 | 405 |
| ZM6.22v2(J3) | 391 | 406 |
| ZM6.22v2(J4) | 392 | 407 |
| ZM6.22v2(J5) | 393 | 408 |
| ZM6.22v2(I2) | 394 | 409 |
| ZM6.22v2(I3) | 395 | 410 |
| ZM6.22v2(I4) | 396 | 411 |
| ZM6.22v2(I5) | 397 | 412 |
| ZM6.22v2(I6) | 398 | 413 |
| ZM6.22v2(I7) | 399 | 414 |
| ZM6.22v2(I8) | 400 | 415 |
| ZM6.22v2(I9) | 401 | 416 |
| ZM6.22v2(J7) | 402 | 417 |
| ZM6.22v2(J8) | 403 | 418 |

[0143] SEQ ID NO: 419 is the nucleotide sequence of the MS26+(7) variant meganuclease with no intron

[0144] SEQ ID NO: 420 is the nucleotide sequence of the linker polypeptide of LIG3-4, MHP14, MHP77.

[0145] SEQ ID NO: 421 is the nucleotide sequence of the linker polypeptide of MHP14(10).

[0146] SEQ ID NO: 422 is the nucleotide sequence of the linker polypeptide of MHP77(L9-01)

[0147] SEQ ID NO: 423 is the nucleotide sequence of the TS21 recognition site in soybean genome.

[0148] SEQ ID NO: 424 is the nucleotide sequence of the TS14 recognition site in soybean genome.

[0149] SEQ ID NO: 425 is the plant-optimized nucleotide sequence of the TS21 meganuclease with a nuclear localization signal and an intron.

[0150] SEQ ID NO: 426 is the plant-optimized nucleotide sequence of the TS21(7) meganuclease with a nuclear localization signal and an intron.

[0151] SEQ ID NO: 427 is the plant-optimized nucleotide sequence of the TS21(15) meganuclease with a nuclear localization signal and an intron.

[0152] SEQ ID NO: 428 plant-optimized nucleotide sequence of the TS21(B65) meganuclease with a nuclear localization signal and an intron.

[0153] SEQ ID NO: 429 is the amino acid sequence of the TS21 meganuclease.

[0154] SEQ ID NO: 430 is the amino acid sequence of the TS21(7) meganuclease.

[0155] SEQ ID NO: 431 is the amino acid sequence of the TS21(15) meganuclease.

[0156] SEQ ID NO: 432 is the amino acid sequence of the TS21(B65) meganuclease

[0157] SEQ ID NO: 433 is the plant-optimized nucleotide sequence of TS14 meganuclease with a nuclear localization signal and an intron.

[0158] SEQ ID NO: 434 is the plant-optimized nucleotide sequence of TS14(15) meganuclease with a nuclear localization signal and an intron

[0159] SEQ ID NO: 435 is the amino acid sequence of the TS14 meganuclease.

[0160] SEQ ID NO: 436 is the amino acid sequence of the TS14(15) meganuclease.

### DETAILED DESCRIPTION OF THE INVENTION

[0161] The present inventions now will be described more fully hereinafter with reference to the accompanying drawings, in which some, but not all embodiments of the inventions are shown. Indeed, these inventions may be embodied in many different forms and should not be construed as limited to the embodiments set forth herein; rather, these embodiments are provided so that this disclosure will satisfy applicable legal requirements. Like numbers refer to like elements throughout.

[0162] Many modifications and other embodiments of the inventions set forth herein will come to mind to one skilled in the art to which these inventions pertain having the benefit of the teachings presented in the foregoing descriptions and the associated drawings. Therefore, it is to be understood that the inventions are not to be limited to the specific embodiments disclosed and that modifications and other embodiments are intended to be included within the scope of the appended claims. Although specific terms are employed herein, they are used in a generic and descriptive sense only and not for purposes of limitation.

[0163] All publications and patent applications mentioned in the specification are indicative of the level of those skilled in the art to which this invention pertains. All publications and patent applications are herein incorporated by reference to the same extent as if each individual publication or patent application was specifically and individually indicated to be incorporated by reference.

[0164] As used herein and in the appended claims, the singular forms “a”, “an”, and “the” include plural reference unless the context clearly dictates otherwise. Thus, for example, reference to “a plant” includes a plurality of such plants; reference to “a cell” includes one or more cells and equivalents thereof known to those skilled in the art, and so forth.

[0165] Unless defined otherwise, all technical and scientific terms used herein have the same meaning as commonly understood by one of ordinary skill in the art to which the invention pertains. Although any methods and materials similar or equivalent to those described herein can be used in the practice for testing of the present invention, specific examples of appropriate materials and methods are described herein. In the context of this disclosure, a number of terms and abbreviations are used. The following definitions are provided.

[0166] I. Overview

[0167] Compositions and methods comprising polynucleotides and polypeptides having meganuclease activity are provided. Also provided are compositions with increased meganuclease activity and methods of use. Further provided are nucleic acid constructs, yeasts, plants, plant cells, explants, seeds and grain having the meganuclease sequences. The methods and compositions employ endonucleases capable of inducing a double-strand break at a recognition sequence within a DNA fragment or within the genome of a yeast cell, plant, plant cell or seed.

[0168] II. Compositions

[0169] As used herein, an “isolated” polynucleotide or polypeptide, or biologically active portion thereof, is substantially or essentially free from components that normally accompany or interact with the polynucleotide or polypeptide as found in its naturally occurring environment. Thus, an isolated or purified polynucleotide or polypeptide is substantially free of other cellular material or culture medium when produced by recombinant techniques, or substantially free of chemical precursors or other chemicals when chemically synthesized. Optimally, an “isolated” polynucleotide is free of sequences (optimally protein encoding sequences) that naturally flank the polynucleotide (i.e., sequences located at the 5′ and 3′ ends of the polynucleotide) in the genomic DNA of the organism from which the polynucleotide is derived. For example, in various embodiments, the isolated polynucleotide can contain less than about 5 kb, 4 kb, 3 kb, 2 kb, 1 kb, 0.5 kb, or 0.1 kb of nucleotide sequence that naturally flank the polynucleotide in genomic DNA of the cell from which the polynucleotide is derived. A polypeptide that is substantially free of cellular material includes preparations of polypeptides having less than about 30%, 20%, 10%, 5%, or 1% (by dry weight) of contaminating protein. When the polypeptide of the invention or biologically active portion thereof is recombinantly produced, optimally culture medium represents less than about 30%, 20%, 10%, 5%, or 1% (by dry weight) of chemical precursors or non-protein-of-interest chemicals.

[0170] As used herein, polynucleotide or polypeptide is “recombinant” when it is artificial or engineered, or derived from an artificial or engineered protein or nucleic acid. For example, a polynucleotide that is inserted into a vector or any other heterologous location, e.g., in a genome of a recombinant organism, such that it is not associated with nucleotide sequences that normally flank the polynucleotide as it is found in nature is a recombinant polynucleotide. A polypeptide expressed in vitro or in vivo from a recombinant polynucleotide is an example of a recombinant polypeptide. Likewise, a polynucleotide sequence that does not appear in nature, for example, a variant of a naturally occurring gene is recombinant.

[0171] A “subsequence” or “fragment” is any portion of an entire sequence.

[0172] The terms “target site”, “target sequence”, “genomic target site” and “genomic target sequence” are used interchangeably herein and refer to a polynucleotide sequence in the genome of a plant cell or yeast cell that comprises a recognition sequence for a double-strand break inducing agent.

[0173] As used herein, the term “recognition sequence” refers to a DNA sequence at which a double-strand break is induced in the plant cell genome by an endonuclease. The terms “recognition sequence”, “recognition site”, “recognition site for an endonuclease”, “meganuclease recognition sequence” and “meganuclease recognition site” are used interchangeably herein. The recognition site can be an endogenous site in the plant genome, or alternatively, the recognition site can be heterologous to the plant and thereby not be naturally occurring in the genome, or the recognition site can be found in a heterologous genomic location compared to where it occurs in nature. As used herein, the term “endogenous recognition site” refers to an endonuclease recognition site that is endogenous or native to the genome of a plant and is located at the endogenous or native position of that recognition site in the genome of the plant. The length of the recognition site can vary, and includes, for example, recognition sites that are at least 4, 6, 8, 10, 12, 14, 16, 18, 19, 20, 21, 22, 23, 24, 25, 26, 27, 28, 29, 30, 31, 32, 33, 34, 35, 36, 37, 38, 39, 40, 41, 42, 43, 44, 45, 46, 47, 48, 49, 50, 51, 52, 53, 54, 55, 56, 57, 58, 59, 60, 61, 62, 63, 64, 65, 66, 67, 68, 69, 70 or more nucleotides in length. It is further possible that the recognition site could be palindromic, that is, the sequence on one strand reads the same in the opposite direction on the complementary strand. The nick/cleavage site could be within the recognition sequence or the nick/cleavage site could be outside of the recognition sequence. In another variation, the cleavage could occur at nucleotide positions immediately opposite each other to produce a blunt end cut or, in other cases, the incisions could be staggered to produce single-stranded overhangs, also called “sticky ends”, which can be either 5′ overhangs, or 3′ overhangs.

[0174] In one embodiment, the recognition sequence of the endonuclease comprises the LIG3-4 (SEQ ID NO: 2), MHP77 (SEQ ID NO: 85), MS26 (SEQ ID NO: 269), MHP14 (SEQ ID NO: 281), MP107 (SEQ ID NO: 328), ZM6.3 (SEQ ID NO: 355) and/or ZM6.22V2 (SEQ ID NO: 388) recognition sites of maize and/or the TS21 (SEQ ID NO:423) and/or the TS14 (SEQ ID NO:424) recognition sites of soybean.

[0175] Active variants and fragments of the recognition can comprise at least 65%, 70%, 75%, 80%, 81%, 82%, 83%, 84%, 85%, 86%, 87%, 88%, 89%, 90%, 91%, 92%, 93%, 94%, 95%, 96%, 97%, 98%, 99% or more sequence identity to the given recognition sequence, wherein the active variants retain biological activity and hence are capable of being recognized and cleaved by an endonuclease.

[0176] An “artificial target sequence” is a target sequence that has been introduced into the genome of a plant. Such an artificial target sequence can be identical in sequence to an endogenous or native target sequence in the genome of a plant but be located in a different position (i.e., a non-endogenous or non-native position) in the genome of a plant.

[0177] The terms “endogenous target sequence” and “native target sequence” are used interchangeable herein to refer to a target sequence that is endogenous or native to the genome of a plant and is at the endogenous or native position of that target sequence in the genome of the plant.

[0178] An “altered target sequence” refers to a target sequence that comprises at least one alteration when compared to non-altered target sequence. Such “alterations” include, for example: (i) replacement of at least one nucleotide, (ii) a deletion of at least one nucleotide, (iii) an insertion of at least one nucleotide, or (iv) any combination of (i)-(iii).

[0179] The term “double-strand-break-inducing agent” as used herein refers to any nuclease which produces a double-strand break in the target sequence. Producing the double-strand break in a target sequence or other DNA can be referred to herein as “cutting” or “cleaving” the target sequence or other DNA.

[0180] An “endonuclease” refers to an enzyme that cleaves the phosphodiester bond within a polynucleotide chain.

[0181] Endonucleases include restriction endonucleases that cleave DNA at specific sites without damaging the bases. Restriction endonucleases include Type I, Type II, Type III, and Type IV endonucleases, which further include subtypes. In the Type I and Type III systems, both the methylase and restriction activities are contained in a single complex. Type I and Type III restriction endonucleases recognize specific recognition sites, but typically cleave at a variable position from the recognition site, which can be hundreds of base pairs away from the recognition site. In Type II systems the restriction activity is independent of any methylase activity, and cleavage typically occurs at specific sites within or near to the recognition site. Most Type II enzymes cut palindromic sequences, however Type IIa enzymes recognize non-palindromic recognition sites and cleave outside of the recognition site, Type IIb enzymes cut sequences twice with both sites outside of the recognition site, and Type IIs enzymes recognize an asymmetric recognition site and cleave on one side and at a defined distance of about 1-20 nucleotides from the recognition site. Type IV restriction enzymes target methylated DNA. Restriction enzymes are further described and classified, for example in the REBASE database (webpage at rebase.neb.com; Roberts et al., (2003) Nucleic Acids Res 31:418-20), Roberts et al., (2003) Nucleic Acids Res 31:1805-12, and Belfort et al., (2002) in Mobile DNA II, pp. 761-783, Eds. Craigie et al., (ASM Press, Washington, D.C.).

[0182] An “engineered endonuclease” refers to an endonuclease that is engineered (modified or derived) from its native form to specifically recognize and induce a double-strand break in the desired recognition site. Thus, an engineered endonuclease can be derived from a native, naturally-occurring endonuclease or it could be artificially created or synthesized. The modification of the endonuclease can be as little as one nucleotide. In some embodiments, the engineered endonuclease induces a double-strand break in a recognition site, wherein the recognition site was not a sequence that would have been recognized by a native (non-engineered or non-modified) endonuclease. Producing a double-strand break in a recognition site or other DNA can be referred to herein as “cutting” or “cleaving” the recognition site or other DNA.

[0183] A “meganuclease” refers to a homing endonuclease, which like restriction endonucleases, bind and cut at a specific recognition site, however the recognition sites for meganucleases are typically longer, about 18 bp or more. In some embodiments of the invention, the meganuclease has been engineered (or modified) to cut a specific endogenous recognition sequence, wherein the endogenous target sequence prior to being cut by the engineered double-strand-break-inducing agent was not a sequence that would have been recognized by a native (non-engineered or non-modified) endonuclease.

[0184] A “meganuclease polypeptide” refers to a polypeptide having meganuclease activity and thus capable of producing a double-strand break in the recognition sequence.

[0185] Meganucleases have been classified into four families based on conserved sequence motifs, the families are the LAGLIDADG, GIY-YIG, H-N-H, and His-Cys box families. These motifs participate in the coordination of metal ions and hydrolysis of phosphodiester bonds. HEases are notable for their long recognition sites, and for tolerating some sequence polymorphisms in their DNA substrates. The naming convention for meganuclease is similar to the convention for other restriction endonuclease. Meganucleases are also characterized by prefix F-, I-, or PI- for enzymes encoded by free-standing open reading frames, introns, and inteins, respectively. For example, intron-, intein-, and freestanding gene encoded meganuclease from Saccharomyces cerevisiae are denoted I-SceI, PI-SceI, and F-SceII, respectively. Meganuclease domains, structure and function are known, see for example, Guhan and Muniyappa (2003) Crit. Rev Biochem Mol Biol 38:199-248; Lucas et al., (2001) Nucleic Acids Res 29:960-9; Jurica and Stoddard, (1999) Cell Mol Life Sci 55:1304-26; Stoddard, (2006) Q Rev Biophys 38:49-95; and Moure et al., (2002) Nat Struct Biol 9:764. In some examples a naturally occurring variant, and/or engineered derivative meganuclease is used. Methods for modifying the kinetics, cofactor interactions, expression, optimal conditions, and/or recognition site specificity, and screening for activity are known, see for example, Epinat et al., (2003) Nucleic Acids Res 31:2952-62; Chevalier et al., (2002) Mol Cell 10:895-905; Gimble et al., (2003) Mol Biol 334:993-1008; Seligman et al., (2002) Nucleic Acids Res 30:3870-9; Sussman et al., (2004) J Mol Biol 342:31-41; Rosen et al., (2006) Nucleic Acids Res 34:4791-800; Chames et al., (2005) Nucleic Acids Res 33:e178; Smith et al., (2006) Nucleic Acids Res 34:e149; Gruen et al., (2002) Nucleic Acids Res 30:e29; Chen and Zhao, (2005) Nucleic Acids Res 33:e154; WO2005105989; WO2003078619; WO2006097854; WO2006097853; WO2006097784; and WO2004031346.

[0186] Any meganuclease can be used herein, including, but not limited to, I-SceI, I-SceII, I-SceIII, I-SceIV, I-SceV, I-SceVI, I-SceVII, I-CeuI, I-CeuAIIP, I-CreI, I-CrepsbIP, I-CrepsbIIP, I-CrepsbIIIP, I-CrepsblVP, I-TliI, I-PpoI, PI-PspI, F-SceI, F-SceII, F-SuvI, F-TevI, F-TevII, I-AmaI, I-AniI, I-ChuI, I-CmoeI, I-CpaI, I-CpaII, I-CsmI, I-CvuI, I-CvuAIP, I-DdiI, I-DdiII, I-DirI, I-DmoI, I-HmuI, I-HmuII, I-HsNIP, I-LlaI, I-MsoI, I-NaaI, I-NanI, I-NcIIP, I-NgrIP, I-NitI, I-NjaI, I-Nsp236IP, I-PakI, I-PboIP, I-PcuIP, I-PcuAI, I-PcuVI, I-PgrIP, I-PobIP, I-PorI, I-PorIIP, I-PbpIP, I-SpBetaIP, I-ScaI, I-SexIP, I-SneIP, I-SpomI, I-SpomCP, I-SpomIP, I-SpomIIP, I-SquIP, I-Ssp6803I, I-SthPhiJP, I-SthPhiST3P, I-SthPhiSTe3bP, I-TdeIP, I-TevI, I-TevII, I-TevIII, I-UarAP, I-UarHGPAIP, I-UarHGPA13P, I-VinIP, I-ZbiIP, PI-MtuI, PI-MtuHIP PI-MtuHIIP, PI-PfuI, PI-PfuII, PI-PkoI, PI-PkoII, PI-Rma43812IP, PI-SpBetaIP, PI-SceI, PI-TfuI, PI-TfuII, PI-Thyl, PI-TliI, PI-TliII, or any active variants or fragments thereof. In a specific embodiment, the engineered endonuclease is derived from I-Cre-I having the sequence set forth in SEQ ID NO: 15, 21 or 26 or an active variant or fragment thereof.

[0187] TAL effector nucleases are a new class of sequence-specific nucleases that can be used to make double-strand breaks at specific target sequences in the genome of a plant or other organism. TAL effector nucleases are created by fusing a native or engineered transcription activator-like (TAL) effector, or functional part thereof, to the catalytic domain of an endonuclease, such as, for example, FokI. The unique, modular TAL effector DNA binding domain allows for the design of proteins with potentially any given DNA recognition specificity. Thus, the DNA binding domains of the TAL effector nucleases can be engineered to recognize specific DNA target sites and thus, used to make double-strand breaks at desired target sequences. See, WO 2010/079430; Morbitzer et al. (2010) PNAS 10.1073/pnas.1013133107; Scholze & Boch (2010) Virulence 1:428-432; Christian et al. Genetics (2010) 186:757-761; Li et al. (2010) Nuc. Acids Res. (2010) doi:10.1093/nar/gkq704; and Miller et al. (2011) Nature Biotechnology 29:143-148; all of which are herein incorporated by reference.

[0188] The term “meganuclease activity” as used herein refers to the ability of a meganuclease to cut at a desired recognition sequence and thus retain double-strand-break-inducing activity.

[0189] Assays for meganuclease activity are known and generally measure the overall activity and specificity of the meganuclease on DNA substrates containing the recognition site. For example, the meganuclease activity can be measured using a yeast screening assay as described herein. Yeast cells with a functional Ade2 gene are white, whereas those lacking Ade2 function exhibit red pigmentation due to accumulation of a metabolite earlier in the adenine biosynthetic pathway resulting in red colonies with white sectors as shown in FIGS. 2 and 3. The degree of white sectoring, sometimes extending to entire colonies, indicates the amount of meganuclease cutting activity. Since the sectoring phenotype is a qualitative measure of meganuclease activity, a 0-4 numerical scoring system was implemented. As shown in FIG. 3, a score of 0 indicates that no white sectors (no meganuclease cutting) were observed; a score of 4 indicates completely white colonies (complete cutting of the recognition site); scores of 1-3 indicate intermediate white sectoring phenotypes (and intermediate degrees of recognition site cutting). Meganuclease activity can also be measured in-vitro as described herein. In short, time-course digestions can be carried out on plasmid DNA containing the meganuclease recognition site at 37° C., 28° C., and 23° C. and the % digestion of each sample or loss of meganuclease recognition sites (indicative of meganuclease activity) can be determined by real-time PCR. Furthermore, meganuclease activity can be measured in-planta by determining the Target Site (TS) mutation rate. Target site mutation rate is defined as: (number of events with target site modification/total number events)*100%.

[0190] An “increased” or an “increased” activity are used interchangeably herein. An “increased” or “increased” meganuclease activity comprises any statistically significant increase in the activity of the parental meganuclease polypeptide as determined through any activity assays described herein.

[0191] The meganuclease can be provided via a polynucleotide encoding the endonuclease. Such a polynucleotide encoding an endonuclease can be modified to substitute codons having a higher frequency of usage in a plant, as compared to the naturally occurring polynucleotide sequence. For example the polynucleotide encoding the meganuclease can be modified to substitute codons having a higher frequency of usage in a maize or soybean plant, as compared to the naturally occurring polynucleotide sequence.

[0192] Various methods and compositions are provided which employ polynucleotides and polypeptides having meganuclease activity.

[0193] In one embodiment, the invention concerns an isolated or recombinant polynucleotide comprising a nucleotide sequence encoding a meganuclease polypeptide, said polypeptide comprising: a) an amino acid sequence having at least one amino acid modification at an amino acid position corresponding to a position of SEQ ID NO:1 selected from the group consisting of positions 2, 12, 16, 22, 23, 31, 36, 43, 50, 56, 58, 59, 62, 71, 72, 73, 80, 81, 82, 86, 91, 95, 98, 103, 113, 114, 116, 117, 118, 121, 124, 128, 129, 131, 147, 151, 153, 159, 160, 161, 162, 163, 164, 165, 166, 167, 168, 169, 170, 171, 172, 173, 174, 175, 176, 177, 178, 179, 180, 182, 183, 184, 185, 186, 187, 188, 189, 190, 191, 192, 194, 195, 196, 197, 200, 203, 204, 209, 222, 232, 236, 237, 246, 254, 258, 267, 278, 281, 282, 289, 308, 311, 312, 316, 318, 319, 334, 339, 340, 342, 345, 346, 348 and combinations thereof; or, b) an amino acid sequence having at least 1, 2, 3, 4, 5, 6, 7, 8, 9, 10, 11, 12, 13, 14, 15, 16, 17, 18, 19, 20, 21, 22, 23, 24, 25, 26, 27, 28, 29, 30, 31, 32, 33, 34, 35, 36, 37, 38, 39, 40, 41, 42, 43 or 44 of any of the amino acid modification of (a).

[0194] In another embodiment, the invention concerns an isolated or recombinant polynucleotide of the current disclosure, and its corresponding polypeptide, wherein said nucleotide sequence encodes a meganuclease polypeptide, wherein said polypeptide further comprises at least one amino acid modification described herein such as those shown in FIG. 5A-FIG. 5E, FIG. 9A-FIG. 9N, FIG. 10A-FIG. 10D, FIG. 11, FIG. 12, FIG. 13, FIG. 14A-FIG. 14F and FIG. 15A-FIG. 15E as well any I-Cre1 type modification known and any combination thereof.

[0195] Further provided are methods and compositions which employ polynucleotides and polypeptides having increased meganuclease activity when compared to an appropriate control. Such meganuclease polypeptides include those set forth in any one of SEQ ID NOs:14-38 (LIG3-4 variants), SEQ ID NOs:87-167 (MHP77 variants, SEQ ID NOs: 251, 252, 253, 262 (MHP77.3 variants), SEQ ID NOs:272-275 (MS26+ variants), SEQ ID NOs:284-298 (MHP14 variants), SEQ ID NOs:315-320 (MHP14+ variants), SEQ ID NOs: 330-341 (MH107 variants), SEQ ID NOs:357-371 (ZM6.3 variants), SEQ ID NOs:390-403 (ZM6.22V2 variants) or SEQ ID NOs: 430-432 and biologically active variants thereof. Further provided are the polynucleotides encoding these various polypeptides and active variant thereof.

[0196] The term “Variant” protein is intended to mean a protein derived from the protein (referred to as parental protein) by deletion (i.e., truncation at the 5′ and/or 3′ end) and/or a deletion or addition of one or more amino acids at one or more internal sites in the parental protein and/or substitution of one or more amino acids at one or more sites in the parental protein. As used herein, a “parental” polynucleotide, polypeptide (protein) can result from human manipulation or from a native protein comprising a naturally occurring nucleotide sequence or amino acid sequence, respectively. Variant proteins encompassed are biologically active, that is they continue to possess the desired biological activity of the parental protein, that is, have meganuclease activity. Such variants may result from, for example, genetic polymorphism or from human manipulation.

[0197] The term “variant meganuclease” refers to a variant protein with meganuclease activity. The variant meganuclease is derived from a parental meganuclease wherein the variant meganuclease comprises at least one amino acid modification when compared to the parental meganuclease polypeptide.

[0198] Variant meganuclease polypeptides of the invention include those set forth in any one of SEQ ID NOs: 14, 15, 16, 17, 18, 19, 20, 21, 22, 23, 24, 25, 26, 27, 28, 29, 30, 31, 32, 33, 34, 35, 36, 37, 38, 87, 88, 89, 90, 91, 92, 93, 94, 95, 96, 97, 98, 99, 100, 101, 102, 103, 104, 105, 106, 107, 108, 109, 110, 111, 112, 113, 114, 115, 116, 117, 118, 119, 120, 121, 122, 123, 124, 125, 126, 127, 128, 129, 130, 131, 132, 133, 134, 135, 136, 137, 138, 139, 140, 141, 142, 143, 144, 145, 146, 147, 148, 149, 150, 151, 152, 153, 154, 155, 156, 157, 158, 159, 160, 161, 162, 163, 164, 165, 166, 167, 251, 252, 253, 262, 272, 273, 274, 275, 284, 285, 286, 287, 288, 289, 290, 291, 292, 293, 294, 295, 296, 297, 298, 315, 316, 317, 318, 319, 320, 330, 331, 332, 334, 335, 336, 337, 338, 339, 340, 341, 357, 358, 359, 360, 361, 362, 363, 364, 365, 366, 367, 368, 369, 370, 370, 371, 390, 391, 392, 393, 394, 395, 396, 397, 398, 399, 400, 401, 402, 403, 430, 431, 432 or 433 and biologically active variants and fragments thereof. Further provided are the polynucleotides encoding these various polypeptides and active variant and fragments thereof.

[0199] Any one of the amino acid modifications identified in Examples 3-23 can be transferred to a parental meganuclease to create a variant meganuclease. These meganucleases can be screened for increased activity by methods described herein.

[0200] One embodiment of the invention concerns the transfer of at least one amino acid modification selected from the group of Y12 to H, G19 to S or A, Q50 to K or R, F54 to I, D56 to L, V105 to A, E124 to R, V129 to A, I132 to V or T, D153 to M or L, V316 to A or I 319 to V to a parental meganuclease in order to improve the activity of the parental meganuclease. Another embodiment concern the transfer of 1, 2, 3, 4, 5, 6, 7, 8, 9, 10, 11, or 12 amino acid modification selected from the group of Y12 to H, G19 to S or A, Q50 to K or R, F54 to I, D56 to L, V105 to A, E124 to R, V129 to A, I132 to V or T, D153 to M or L, V316 to A or I 319 to V to a parental meganuclease in order to improve the activity of the parental meganuclease.

[0201] Any one of the modifications described herein can be combined with other known modifications of I-CreI type meganucleases.

[0202] As used herein with respect to a recombinant polynucleotide encoding a recombinant protein, term “modification” means any insertion, deletion or substitution of an amino acid residue in the recombinant protein sequence relative to a reference or control sequence.

[0203] “Variants” is intended to mean substantially similar sequences. For polynucleotides, conservative variants include those sequences that, because of the degeneracy of the genetic code, encode the amino acid sequence of one of the meganuclease polypeptides of the invention. Naturally occurring variants such as these can be identified with the use of well-known molecular biology techniques, as, for example, with polymerase chain reaction (PCR) and hybridization techniques as outlined below. Variant polynucleotides also include synthetically derived polynucleotides, such as those generated, for example, by using site-directed mutagenesis or gene synthesis but which still encode a meganuclease polypeptide.

[0204] Biologically Active variants of meganucleases (i.e. variant meganucleases) are also provided. Variant meganucleases are biologically active variants of a meganuclease polypeptide (and the polynucleotide encoding the same) will have at least about 80%, 81%, 82%, 83%, 84%, 85%, 86%, 87%, 88%, 89%, 90%, 91%, 92%, 93%, 94%, 95%, 95.5%, 95.7%, 95.9%, 96%, 96.3%, 96.5%, 96.9%, 97%, 97.3%, 97.5%, 97.9%, 98%, 98.3%, 98.5%, 98.9%, 99%, 99.3%, 99.5%, 99.6% or more sequence identity to the polypeptide of a control meganuclease, wherein the active variants retain the ability to cut at a desired recognition site. For example, any of the variant meganucleases described herein can be modified from a parental endonuclease sequence and designed to recognize and induce a double strand break at the same recognition site of the parental meganuclease. Thus in some embodiments, the variant meganuclease contains at least one amino acid modification when compared to the parental meganuclease and has a specificity to induce a double-strand break at the same recognition sequence as the corresponding parental meganuclease recognition sequence.

[0205] A “control meganuclease” or “reference meganuclease” can be used interchangeably and refers to any meganuclease to which a variant meganuclease is compared to. Control meganucleases can include, but are not limited to, parental or corresponding meganucleases or any wild-type I-Cre1 type meganucleases.

[0206] Numbering of an amino acid or nucleotide polymer, such any one of the meganucleases of the invention, corresponds to numbering of a selected amino acid polymer or nucleic acid when the position of a given monomer component (amino acid residue, incorporated nucleotide, etc.) of the polymer corresponds to the same residue position in a selected reference polypeptide or polynucleotide.

[0207] Further provided are biologically active variants of a meganuclease polypeptide (and the polynucleotide encoding the same) that will have at least about 80%, 81%, 82%, 83%, 84%, 85%, 86%, 87%, 88%, 89%, 90%, 91%, 92%, 93%, 94%, 95%, 95.5%, 95.7%, 95.9%, 96%, 96.3%, 96.5%, 96.9%, 97%, 97.3%, 97.5%, 97.9%, 98%, 98.3%, 98.5%, 98.9%, 99%, 99.3%, 99.5%, 99.6% or more sequence identity to the polypeptide of any one of SEQ ID NO: 14, 15, 16, 17, 18, 19, 20, 21, 22, 23, 24, 25, 26, 27, 28, 29, 30, 31, 32, 33, 34, 35, 36, 37, 38, 87, 88, 89, 90, 91, 92, 93, 94, 95, 96, 97, 98, 99, 100, 101, 102, 103, 104, 105, 106, 107, 108, 109, 110, 111, 112, 113, 114, 115, 116, 117, 118, 119, 120, 121, 122, 123, 124, 125, 126, 127, 128, 129, 130, 131, 132, 133, 134, 135, 136, 137, 138, 139, 140, 141, 142, 143, 144, 145, 146, 147, 148, 149, 150, 151, 152, 153, 154, 155, 156, 157, 158, 159, 160, 161, 162, 163, 164, 165, 166, 167, 251, 252, 253, 262, 272, 273, 274, 275, 284, 285, 286, 287, 288, 289, 290, 291, 292, 293, 294, 295, 296, 297, 298, 315, 316, 317, 318, 319, 320, 330, 331, 332, 334, 335, 336, 337, 338, 339, 340, 341, 357, 358, 359, 360, 361, 362, 363, 364, 365, 366, 367, 368, 369, 370, 370, 371, 390, 391, 392, 393, 394, 395, 396, 397, 398, 399, 400, 401, 402, 403, 430, 431, 432 or 433 or with regard to any of the meganuclease polypeptides disclosed herein as determined by sequence alignment

[0208] In one embodiment the variant meganuclease of the present invention comprises a linker polypeptide, wherein said linker polypeptide comprises: a) SEQ ID NO:420; b) SEQ ID NO:421; c) SEQ ID NO:422; or, d) an amino acid sequence consisting of any possible amino acid at positions corresponding to positions 156 to 193 of SEQ ID NO:1. It is also understood that these linker sequences can be substituted for any other linker sequence that links both I-Cre type monomers while still enabling the single polypeptide meganuclease to provide a double strand break at a target sequence.

[0209] As used herein, a “genomic region of interest” is a segment of a chromosome in the genome of a plant that is desirable for introducing a polynucleotide of interest or trait of interest. The genomic region of interest can include, for example, one or more polynucleotides of interest. Generally, a genomic region of interest of the present invention comprises a segment of chromosome that is 0-15 cM.

[0210] As used herein, a “polynucleotide of interest” within a genomic region of interest is any coding and/or non-coding portion of the genomic region of interest including, but not limited to, a transgene, a native gene, a mutated gene, and a genetic marker such as, for example, a single nucleotide polymorphism (SNP) marker and a simple sequence repeat (SSR) marker.

[0211] As used herein, “physically linked,” “in physical linkage”, and “genetically linked” are used to refer to any two or more genes, transgenes, native genes, mutated genes, alterations, target sites, markers, and the like that are part of the same DNA molecule or chromosome.

[0212] Sequence Comparisons

[0213] The following terms are used to describe the sequence relationships between two or more polynucleotides or polypeptides: (a) “reference sequence”, (b) “comparison window”, (c) “sequence identity”, and, (d) “percent sequence identity.”

[0214] (a) As used herein, “reference sequence” is a defined sequence used as a basis for sequence comparison. A reference sequence may be a subset or the entirety of a specified sequence; for example, as a segment of a full-length cDNA or gene sequence, or the complete cDNA or gene sequence or protein sequence.

[0215] (b) As used herein, “comparison window” makes reference to a contiguous and specified segment of a polypeptide sequence, wherein the polypeptide sequence in the comparison window may comprise additions or deletions (i.e., gaps) compared to the reference sequence (which does not comprise additions or deletions) for optimal alignment of the two polypeptides. Generally, the comparison window is at least 5, 10, 15, or 20 contiguous amino acid in length, or it can be 30, 40, 50, 100, or longer. Those of skill in the art understand that to avoid a high similarity to a reference sequence due to inclusion of gaps in the polypeptide sequence a gap penalty is typically introduced and is subtracted from the number of matches.

[0216] Methods of alignment of sequences for comparison are well known in the art. Thus, the determination of percent sequence identity between any two sequences can be accomplished using a mathematical algorithm. Non-limiting examples of such mathematical algorithms are the algorithm of Myers and Miller (1988) CABIOS 4:11-17; the local alignment algorithm of Smith et al. (1981) Adv. Appl. Math. 2:482; the global alignment algorithm of Needleman and Wunsch (1970) J. Mol. Biol. 48:443-453; the search-for-local alignment method of Pearson and Lipman (1988) Proc. Natl. Acad. Sci. 85:2444-2448; the algorithm of Karlin and Altschul (1990) Proc. Natl. Acad. Sci. USA 872264, modified as in Karlin and Altschul (1993) Proc. Natl. Acad. Sci. USA 90:5873-5877. Computer implementations of these mathematical algorithms can be utilized for comparison of sequences to determine sequence identity. Such implementations include, but are not limited to: CLUSTAL in the PC/Gene program (available from Intelligenetics, Mountain View, Calif.); the ALIGN program (Version 2.0) and GAP, BESTFIT, BLAST, FASTA, and TFASTA in the GCG Wisconsin Genetics Software Package, Version 10 (available from Accelrys Inc., 9685 Scranton Road, San Diego, Calif., USA). Alignments using these programs can be performed using the default parameters. The CLUSTAL program is well described by Higgins et al. (1988) Gene 73:237-244 (1988); Higgins et al. (1989) CABIOS 5:151-153; Corpet et al. (1988) Nucleic Acids Res. 16:10881-90; Huang et al. (1992) CABIOS 8:155-65; and Pearson et al. (1994) Meth. Mol. Biol. 24:307-331. The ALIGN program is based on the algorithm of Myers and Miller (1988) supra. A PAM120 weight residue table, a gap length penalty of 12, and a gap penalty of 4 can be used with the ALIGN program when comparing amino acid sequences. The BLAST programs of Altschul et al (1990) J. Mol. Biol. 215:403 are based on the algorithm of Karlin and Altschul (1990) supra. BLAST nucleotide searches can be performed with the BLASTN program, score=100, wordlength=12, to obtain nucleotide sequences homologous to a nucleotide sequence encoding a protein of the invention. BLAST protein searches can be performed with the BLASTX program, score=50, wordlength=3, to obtain amino acid sequences homologous to a protein or polypeptide of the invention. BLASTP protein searches can be performed using default parameters. See, blast.ncbi.nlm.nih.gov/Blast.cgi.

[0217] Sequence alignments and percent similarity calculations may be determined using the Megalign program of the LASARGENE bioinformatics computing suite (DNASTAR Inc., Madison, Wis.) or using the AlignX program of the Vector NTI bioinformatics computing suite (Invitrogen, Carlsbad, Calif.). Multiple alignment of the sequences are performed using the Clustal method of alignment (Higgins and Sharp, CABIOS 5:151-153 (1989)) with the default parameters (GAP PENALTY=10, GAP LENGTH PENALTY=10). Default parameters for pairwise alignments and calculation of percent identity of protein sequences using the Clustal method are KTUPLE=1, GAP PENALTY=3, WINDOW=5 and DIAGONALS SAVED=5. For nucleic acids these parameters are GAP PENALTY=10, GAP LENGTH PENALTY=10, KTUPLE=2, GAP PENALTY=5, WINDOW=4 and DIAGONALS SAVED=4. A “substantial portion” of an amino acid or nucleotide sequence comprises enough of the amino acid sequence of a polypeptide or the nucleotide sequence of a gene to afford putative identification of that polypeptide or gene, either by manual evaluation of the sequence by one skilled in the art, or by computer-automated sequence comparison and identification using algorithms such as BLAST (Altschul, S. F. et al., J. Mol. Biol. 215:403-410 (1993)) and Gapped Blast (Altschul, S. F. et al., Nucleic Acids Res. 25:3389-3402 (1997)). BLASTN refers to a BLAST program that compares a nucleotide query sequence against a nucleotide sequence database.

[0218] “Gene” refers to a nucleic acid fragment that expresses a specific protein, including regulatory sequences preceding (5′ non-coding sequences) and following (3′ non-coding sequences) the coding sequence. “Native gene” refers to a gene as found in nature with its own regulatory sequences. “Chimeric gene” or “recombinant expression construct”, which are used interchangeably, refers to any gene that is not a native gene, comprising regulatory and coding sequences that are not found together in nature. Accordingly, a chimeric gene may comprise regulatory sequences and coding sequences that are derived from different sources, or regulatory sequences and coding sequences derived from the same source, but arranged in a manner different than that found in nature. “Endogenous gene” refers to a native gene in its natural location in the genome of an organism. A “foreign” gene refers to a gene not normally found in the host organism, but that is introduced into the host organism by gene transfer. Foreign genes can comprise native genes inserted into a non-native organism, or chimeric genes. A “transgene” is a gene that has been introduced into the genome by a transformation procedure.

[0219] “Coding sequence” refers to a DNA sequence which codes for a specific amino acid sequence. “Regulatory sequences” refer to nucleotide sequences located upstream (5′ non-coding sequences), within, or downstream (3′ non-coding sequences) of a coding sequence, and which influence the transcription, RNA processing or stability, or translation of the associated coding sequence. Regulatory sequences may include, but are not limited to, promoters, translation leader sequences, introns, and polyadenylation recognition sequences.

[0220] “Codon degeneracy” refers to divergence in the genetic code permitting variation of the nucleotide sequence without affecting the amino acid sequence of an encoded polypeptide. Accordingly, the instant invention relates to any nucleic acid fragment comprising a nucleotide sequence that encodes all or a substantial portion of the amino acid sequences set forth herein. The skilled artisan is well aware of the “codon-bias” exhibited by a specific host cell in usage of nucleotide codons to specify a given amino acid. Therefore, when synthesizing a nucleic acid fragment for increased expression in a host cell, it is desirable to design the nucleic acid fragment such that its frequency of codon usage approaches the frequency of preferred codon usage of the host cell.

[0221] As used herein, “sequence identity” or “identity” in the context of two polynucleotides or polypeptide sequences makes reference to the residues in the two sequences that are the same when aligned for maximum correspondence over a specified comparison window. When percentage of sequence identity is used in reference to proteins it is recognized that residue positions which are not identical often differ by conservative amino acid substitutions, where amino acid residues are substituted for other amino acid residues with similar chemical properties (e.g., charge or hydrophobicity). When sequences differ in conservative substitutions, the percent sequence identity may be adjusted upwards to correct for the conservative nature of the substitution. Sequences that differ by such conservative substitutions are said to have “sequence similarity” or “similarity”. Means for making this adjustment are well known to those of skill in the art. Typically this involves scoring a conservative substitution as a partial rather than a full mismatch, thereby increasing the percent sequence identity. Thus, for example, where an identical amino acid is given a score of 1 and a non-conservative substitution is given a score of zero, a conservative substitution is given a score between zero and 1. The scoring of conservative substitutions is calculated, e.g., as implemented in the program PC/GENE (Intelligenetics, Mountain View, Calif.).

[0222] As used herein, “percent sequence identity” means the value determined by comparing two aligned sequences over a comparison window, wherein the portion of the polynucleotide sequence in the comparison window may comprise additions or deletions (i.e., gaps) as compared to the reference sequence (which does not comprise additions or deletions) for optimal alignment of the two sequences. The percentage is calculated by determining the number of positions at which the identical nucleic acid base or amino acid residue occurs in both sequences to yield the number of matched positions, dividing the number of matched positions by the total number of positions in the window of comparison, and multiplying the result by 100 to yield the percent sequence identity.

### Polynucleotide Constructs

[0223] Provided herein are polynucleotides or nucleic acid molecules comprising the meganucleases or any active variants or fragments thereof. The terms “polynucleotide,” “polynucleotide sequence,” “nucleic acid sequence,” and “nucleic acid fragment” are used interchangeably herein. These terms encompass nucleotide sequences and the like. The use of the term “polynucleotide” is not intended to limit the present invention to polynucleotides comprising DNA. Those of ordinary skill in the art will recognize that polynucleotides can comprise ribonucleotides and combinations of ribonucleotides and deoxyribonucleotides. Such deoxyribonucleotides and ribonucleotides include both naturally occurring molecules and synthetic analogues. The polynucleotides of the invention also encompass all forms of sequences including, but not limited to, single-stranded forms, double-stranded forms, hairpins, stem-and-loop structures, and the like.

[0224] Further provided are recombinant polynucleotides comprising the various meganucleases. The terms “recombinant polynucleotide”, “recombinant nucleotide”, “recombinant DNA” and “recombinant DNA construct” are used interchangeably herein. A recombinant construct comprises an artificial or heterologous combination of nucleic acid sequences, e.g., regulatory and coding sequences that are not found together in nature. For example, a transfer cassette can comprise restriction sites and a heterologous polynucleotide of interest. In other embodiments, a recombinant construct may comprise regulatory sequences and coding sequences that are derived from different sources, or regulatory sequences and coding sequences derived from the same source, but arranged in a manner different than that found in nature. Such a construct may be used by itself or may be used in conjunction with a vector. If a vector is used, then the choice of vector is dependent upon the method that will be used to transform host cells as is well known to those skilled in the art. For example, a plasmid vector can be used. The skilled artisan is well aware of the genetic elements that must be present on the vector in order to successfully transform, select and propagate host cells comprising any of the isolated nucleic acid fragments provided herein. The skilled artisan will also recognize that different independent transformation events will result in different levels and patterns of expression (Jones et al., EMBO J. 4:2411-2418 (1985); De Almeida et al., Mol. Gen. Genetics 218:78-86 (1989)), and thus that multiple events must be screened in order to obtain lines displaying the desired expression level and pattern. Such screening may be accomplished by Southern analysis of DNA, Northern analysis of mRNA expression, immunoblotting analysis of protein expression, or phenotypic analysis, among others.

[0225] The meganuclease polynucleotides disclosed herein can be provided in expression cassettes for expression in the plant of interest. The cassette can include 5′ and 3′ regulatory sequences operably linked to an meganuclease polynucleotide or active variant or fragment thereof. “Operably linked” is intended to mean a functional linkage between two or more elements. For example, an operable linkage between a polynucleotide of interest and a regulatory sequence (i.e., a promoter) is a functional link that allows for expression of the polynucleotide of interest. Operably linked elements may be contiguous or non-contiguous. When used to refer to the joining of two protein coding regions, by operably linked is intended that the coding regions are in the same reading frame. The cassette may additionally contain at least one additional gene to be cotransformed into the organism. Alternatively, the additional gene(s) can be provided on multiple expression cassettes. Such an expression cassette is provided with a plurality of restriction sites and/or recombination sites for insertion of the meganuclease polynucleotide or active variant or fragment thereof to be under the transcriptional regulation of the regulatory regions. The expression cassette may additionally contain selectable marker genes.

[0226] The expression cassette can include in the 5′-3′ direction of transcription, a transcriptional and translational initiation region (i.e., a promoter), a meganuclease polynucleotide or active variant or fragment thereof, and a transcriptional and translational termination region (i.e., termination region) functional in plants. The regulatory regions (i.e., promoters, transcriptional regulatory regions, and translational termination regions) and/or the meganuclease polynucleotide or active variant or fragment thereof may be native/analogous to the host cell or to each other. Alternatively, the regulatory regions and/or the meganuclease polynucleotide of or active variant or fragment thereof may be heterologous to the host cell or to each other.

[0227] As used herein, “heterologous” in reference to a sequence is a sequence that originates from a foreign species, or, if from the same species, is substantially modified from its native form in composition and/or genomic locus by deliberate human intervention. For example, a promoter operably linked to a heterologous polynucleotide is from a species different from the species from which the polynucleotide was derived, or, if from the same/analogous species, one or both are substantially modified from their original form and/or genomic locus, or the promoter is not the native promoter for the operably linked polynucleotide.

[0228] While it may be optimal to express the sequences using heterologous promoters, the native promoter sequences may be used. Such constructs can change expression levels of the meganuclease polynucleotide in the plant or plant cell. Thus, the phenotype of the plant or plant cell can be altered.

[0229] The termination region may be native with the transcriptional initiation region, may be native with the operably linked meganuclease polynucleotide or active variant or fragment thereof, may be native with the plant host, or may be derived from another source (i.e., foreign or heterologous) to the promoter, the meganuclease polynucleotide or active fragment or variant thereof, the plant host, or any combination thereof. Convenient termination regions are available from the Ti-plasmid of A. tumefaciens, such as the octopine synthase and nopaline synthase termination regions. See also Guerineau et al. (1991) Mol. Gen. Genet. 262:141-144; Proudfoot (1991) Cell 64:671-674; Sanfacon et al. (1991) Genes Dev. 5:141-149; Mogen et al. (1990) Plant Cell 2:1261-1272; Munroe et al. (1990) Gene 91:151-158; Ballas et al. (1989) Nucleic Acids Res. 17:7891-7903; and Joshi et al. (1987) Nucleic Acids Res. 15:9627-9639.

[0230] Where appropriate, the polynucleotides may be optimized for increased expression in the transformed plant. That is, the polynucleotides can be synthesized using plant-preferred codons for improved expression. See, for example, Campbell and Gowri (1990) Plant Physiol. 92:1-11 for a discussion of host-preferred codon usage. Methods are available in the art for synthesizing plant-preferred genes. See, for example, U.S. Pat. Nos. 5,380,831, and 5,436,391, and Murray et al. (1989) Nucleic Acids Res. 17:477-498, herein incorporated by reference.

[0231] Additional sequence modifications are known to enhance gene expression in a cellular host. These include elimination of sequences encoding spurious polyadenylation signals, exon-intron splice site signals, transposon-like repeats, and other such well-characterized sequences that may be deleterious to gene expression. The G-C content of the sequence may be adjusted to levels average for a given cellular host, as calculated by reference to known genes expressed in the host cell. When possible, the sequence is modified to avoid predicted hairpin secondary mRNA structures.

[0232] The expression cassettes may additionally contain 5′ leader sequences. Such leader sequences can act to enhance translation. Translation leaders are known in the art and include: picornavirus leaders, for example, EMCV leader (Encephalomyocarditis 5′ noncoding region) (Elroy-Stein et al. (1989) Proc. Natl. Acad. Sci. USA 86:6126-6130); potyvirus leaders, for example, TEV leader (Tobacco Etch Virus) (Gallie et al. (1995) Gene 165(2):233-238), MDMV leader (Maize Dwarf Mosaic Virus) (Virology 154:9-20), and human immunoglobulin heavy-chain binding protein (BiP) (Macejak et al. (1991) Nature 353:90-94); untranslated leader from the coat protein mRNA of alfalfa mosaic virus (AMV RNA 4) (Jobling et al. (1987) Nature 325:622-625); tobacco mosaic virus leader (TMV) (Gallie et al. (1989) in Molecular Biology of RNA, ed. Cech (Liss, New York), pp. 237-256); and maize chlorotic mottle virus leader (MCMV) (Lommel et al. (1991) Virology 81:382-385. See also, Della-Cioppa et al. (1987) Plant Physiol. 84:965-968.

[0233] In preparing the expression cassette, the various DNA fragments may be manipulated, so as to provide for the DNA sequences in the proper orientation and, as appropriate, in the proper reading frame. Toward this end, adapters or linkers may be employed to join the DNA fragments or other manipulations may be involved to provide for convenient restriction sites, removal of superfluous DNA, removal of restriction sites, or the like. For this purpose, in vitro mutagenesis, primer repair, restriction, annealing, resubstitutions, e.g., transitions and transversions, may be involved.

[0234] A number of promoters can be used to express the various meganuclease sequence disclosed herein, including the native promoter of the polynucleotide sequence of interest. The promoters can be selected based on the desired outcome. Such promoters include, for example, constitutive, tissue-preferred, or other promoters for expression in plants.

[0235] Constitutive promoters include, for example, the core promoter of the Rsyn7 promoter and other constitutive promoters disclosed in WO 99/43838 and U.S. Pat. No. 6,072,050; the core CaMV 35S promoter (Odell et al. (1985) Nature 313:810-812); rice actin (McElroy et al. (1990) Plant Cell 2:163-171); ubiquitin (Christensen et al. (1989) Plant Mol. Biol. 12:619-632 and Christensen et al. (1992) Plant Mol. Biol. 18:675-689); pEMU (Last et al. (1991) Theor. Appl. Genet. 81:581-588); MAS (Velten et al. (1984) EMBO J. 3:2723-2730); ALS promoter (U.S. Pat. No. 5,659,026), and the like. Other constitutive promoters include, for example, U.S. Pat. Nos. 5,608,149; 5,608,144; 5,604,121; 5,569,597; 5,466,785; 5,399,680; 5,268,463; 5,608,142; and 6,177,611.

[0236] Tissue-preferred promoters can be utilized to target enhanced meganuclease expression within a particular plant tissue. Tissue-preferred promoters include those described in Yamamoto et al. (1997) Plant J. 12(2):255-265; Kawamata et al. (1997) Plant Cell Physiol. 38(7):792-803; Hansen et al. (1997) Mol. Gen. Genet. 254(3):337-343; Russell et al. (1997) Transgenic Res. 6(2):157-168; Rinehart et al. (1996) Plant Physiol. 112(3):1331-1341; Van Camp et al. (1996) Plant Physiol. 112(2):525-535; Canevascini et al. (1996) Plant Physiol. 112(2):513-524; Yamamoto et al. (1994) Plant Cell Physiol. 35(5):773-778; Lam (1994) Results Probl. Cell Differ. 20:181-196; Orozco et al. (1993) Plant Mol. Biol. 23(6):1129-1138; Matsuoka et al. (1993) Proc Natl. Acad. Sci. USA 90(20):9586-9590; and Guevara-Garcia et al. (1993) Plant J. 4(3):495-505. Such promoters can be modified, if necessary, for weak expression.

[0237] Leaf-preferred promoters are known in the art. See, for example, Yamamoto et al. (1997) Plant J. 12(2):255-265; Kwon et al. (1994) Plant Physiol. 105:357-67; Yamamoto et al. (1994) Plant Cell Physiol. 35(5):773-778; Gotor et al. (1993) Plant J. 3:509-18; Orozco et al. (1993) Plant Mol. Biol. 23(6):1129-1138; and Matsuoka et al. (1993) Proc. Natl. Acad. Sci. USA 90(20):9586-9590.

[0238] Synthetic promoters can be used to express meganuclease sequences or biologically active variants and fragments thereof.

[0239] The expression cassette can also comprise a selectable marker gene for the selection of transformed cells. Selectable marker genes are utilized for the selection of transformed cells or tissues. Marker genes include genes encoding antibiotic resistance, such as those encoding neomycin phosphotransferase II (NEO) and hygromycin phosphotransferase (HPT), as well as genes conferring resistance to herbicidal compounds, such as glyphosate, glufosinate ammonium, bromoxynil, sulfonylureas, dicamba, and 2,4-dichlorophenoxyacetate (2,4-D). Additional selectable markers include phenotypic markers such as β-galactosidase and fluorescent proteins such as green fluorescent protein (GFP) (Su et al. (2004) Biotechnol Bioeng 85:610-9 and Fetter et al. (2004) Plant Cell 16:215-28), cyan florescent protein (CYP) (Bolte et al. (2004) J. Cell Science 117:943-54 and Kato et al. (2002) Plant Physiol 129:913-42), and yellow florescent protein (PhiYFP™ from Evrogen, see, Bolte et al. (2004) J. Cell Science 117:943-54). For additional selectable markers, see generally, Yarranton (1992) Curr. Opin. Biotech. 3:506-511; Christopherson et al. (1992) Proc. Natl. Acad. Sci. USA 89:6314-6318; Yao et al. (1992) Cell 71:63-72; Reznikoff (1992) Mol. Microbiol. 6:2419-2422; Barkley et al. (1980) in The Operon, pp. 177-220; Hu et al. (1987) Cell 48:555-566; Brown et al. (1987) Cell 49:603-612; Figge et al. (1988) Cell 52:713-722; Deuschle et al. (1989) Proc. Natl. Acad. Aci. USA 86:5400-5404; Fuerst et al. (1989) Proc. Natl. Acad. Sci. USA 86:2549-2553; Deuschle et al. (1990) Science 248:480-483; Gossen (1993) Ph.D. Thesis, University of Heidelberg; Reines et al. (1993) Proc. Natl. Acad. Sci. USA 90:1917-1921; Labow et al. (1990) Mol. Cell. Biol. 10:3343-3356; Zambretti et al. (1992) Proc. Natl. Acad. Sci. USA 89:3952-3956; Baim et al. (1991) Proc. Natl. Acad. Sci. USA 88:5072-5076; Wyborski et al. (1991) Nucleic Acids Res. 19:4647-4653; Hillenand-Wissman (1989) Topics Mol. Struc. Biol. 10:143-162; Degenkolb et al. (1991) Antimicrob. Agents Chemother. 35:1591-1595; Kleinschnidt et al. (1988) Biochemistry 27:1094-1104; Bonin (1993) Ph.D. Thesis, University of Heidelberg; Gossen et al. (1992) Proc. Natl. Acad. Sci. USA 89:5547-5551; Oliva et al. (1992) Antimicrob. Agents Chemother. 36:913-919; Hlavka et al. (1985) Handbook of Experimental Pharmacology, Vol. 78 (Springer-Verlag, Berlin); Gill et al. (1988) Nature 334:721-724. Such disclosures are herein incorporated by reference. The above list of selectable marker genes is not meant to be limiting. Any selectable marker gene can be used in the present invention.

### Method of Introducing

[0240] The meganuclease may be introduced by any means known in the art. For example, a cell, yeast or plant having the recognition site in its genome is provided. The meganuclease may be transiently expressed or the polypeptide itself can be directly provided to the cell. Alternatively, a nucleotide sequence capable of expressing the meganuclease may be stably integrated into the genome of the plant. In the presence of the corresponding recognition site and the meganuclease, a donor DNA can be inserted into the transformed plant's genome. Alternatively, the different components may be brought together by sexually crossing transformed plants. Thus a sequence encoding a meganuclease and/or target site can be sexually crossed to one another to allow each component of the system to be present in a single plant. The meganuclease may be under the control of a constitutive or inducible promoter. Such promoters of interest are discussed in further detail elsewhere herein.

[0241] Various methods can be used to introduce a sequence of interest such as, any of the meganuclease of the invention, into a plant or plant part. “Introducing” is intended to mean presenting to the plant, plant cell or plant part the polynucleotide or polypeptide in such a manner that the sequence gains access to the interior of a cell of the plant. The methods of the invention do not depend on a particular method for introducing a sequence into a plant or plant part, only that the polynucleotide or polypeptides gains access to the interior of at least one cell of the plant. Methods for introducing polynucleotide or polypeptides into plants are known in the art including, but not limited to, stable transformation methods, transient transformation methods, and virus-mediated methods.

[0242] “Stable transformation” is intended to mean that the nucleotide construct introduced into a plant integrates into the genome of the plant and is capable of being inherited by the progeny thereof “Transient transformation” is intended to mean that a polynucleotide is introduced into the plant and does not integrate into the genome of the plant or a polypeptide is introduced into a plant.

[0243] Transformation protocols as well as protocols for introducing polypeptides or polynucleotide sequences into plants may vary depending on the type of plant or plant cell, i.e., monocot or dicot, targeted for transformation. Suitable methods of introducing polypeptides and polynucleotides into plant cells include microinjection (Crossway et al. (1986) Biotechniques 4:320-334), electroporation (Riggs et al. (1986) Proc. Natl. Acad. Sci. USA 83:5602-5606, Agrobacterium-mediated transformation (U.S. Pat. No. 5,563,055 and U.S. Pat. No. 5,981,840), direct gene transfer (Paszkowski et al. (1984) EMBO J. 3:2717-2722), and ballistic particle acceleration (see, for example, U.S. Pat. No. 4,945,050; U.S. Pat. No. 5,879,918; U.S. Pat. No. 5,886,244; and, 5,932,782; Tomes et al. (1995) in Plant Cell, Tissue, and Organ Culture: Fundamental Methods, ed. Gamborg and Phillips (Springer-Verlag, Berlin); McCabe et al. (1988) Biotechnology 6:923-926); and Lec1 transformation (WO 00/28058). Also see Weissinger et al. (1988) Ann. Rev. Genet. 22:421-477; Sanford et al. (1987) Particulate Science and Technology 5:27-37 (onion); Christou et al. (1988) Plant Physiol. 87:671-674 (soybean); McCabe et al. (1988) Bio/Technology 6:923-926 (soybean); Finer and McMullen (1991) In Vitro Cell Dev. Biol. 27P:175-182 (soybean); Singh et al. (1998) Theor. Appl. Genet. 96:319-324 (soybean); Datta et al. (1990) Biotechnology 8:736-740 (rice); Klein et al. (1988) Proc. Natl. Acad. Sci. USA 85:4305-4309 (maize); Klein et al. (1988) Biotechnology 6:559-563 (maize); U.S. Pat. Nos. 5,240,855; 5,322,783; and, 5,324,646; Klein et al. (1988) Plant Physiol. 91:440-444 (maize); Fromm et al. (1990) Biotechnology 8:833-839 (maize); Hooykaas-Van Slogteren et al. (1984) Nature (London) 311:763-764; U.S. Pat. No. 5,736,369 (cereals); Bytebier et al. (1987) Proc. Natl. Acad. Sci. USA 84:5345-5349 (Liliaceae); De Wet et al. (1985) in The Experimental Manipulation of Ovule Tissues, ed. Chapman et al. (Longman, N.Y.), pp. 197-209 (pollen); Kaeppler et al. (1990) Plant Cell Reports 9:415-418 and Kaeppler et al. (1992) Theor. Appl. Genet. 84:560-566 (whisker-mediated transformation); D'Halluin et al. (1992) Plant Cell 4:1495-1505 (electroporation); Li et al. (1993) Plant Cell Reports 12:250-255 and Christou and Ford (1995) Annals of Botany 75:407-413 (rice); Osjoda et al. (1996) Nature Biotechnology 14:745-750 (maize via Agrobacterium tumefaciens); all of which are herein incorporated by reference.

[0244] In specific embodiments, the meganuclease sequences or active variant or fragments thereof can be provided to a yeast cell or plant using a variety of transient transformation methods. Such transient transformation methods include, but are not limited to, the introduction of the meganuclease protein or active variants and fragments thereof directly into a yeast cell or plant. Such methods include, for example, microinjection or particle bombardment. See, for example, Crossway et al. (1986) Mol. Gen. Genet. 202:179-185; Nomura et al. (1986) Plant Sci. 44:53-58; Hepler et al. (1994) Proc. Natl. Acad. Sci. 91: 2176-2180 and Hush et al. (1994) The Journal of Cell Science 107:775-784, all of which are herein incorporated by reference.

[0245] In other embodiments, the polynucleotide of the invention may be introduced into yeast cells or plants by contacting plants with a virus or viral nucleic acids. Generally, such methods involve incorporating a nucleotide construct of the invention within a DNA or RNA molecule. It is recognized that the an meganuclease sequence may be initially synthesized as part of a viral polyprotein, which later may be processed by proteolysis in vivo or in vitro to produce the desired recombinant protein. Further, it is recognized that promoters of the invention also encompass promoters utilized for transcription by viral RNA polymerases. Methods for introducing polynucleotides into plants and expressing a protein encoded therein, involving viral DNA or RNA molecules, are known in the art. See, for example, U.S. Pat. Nos. 5,889,191, 5,889,190, 5,866,785, 5,589,367, 5,316,931, and Porta et al. (1996) Molecular Biotechnology 5:209-221; herein incorporated by reference.

[0246] Methods are known in the art for the targeted insertion of a polynucleotide at a specific location in the plant genome. In one embodiment, the insertion of the polynucleotide at a desired genomic location is achieved using a site-specific recombination system. See, for example, WO99/25821, WO99/25854, WO99/25840, WO99/25855, and WO99/25853, all of which are herein incorporated by reference. Briefly, the polynucleotide of the invention can be contained in transfer cassette flanked by two non-recombinogenic recombination sites. The transfer cassette is introduced into a plant having stably incorporated into its genome a target site which is flanked by two non-recombinogenic recombination sites that correspond to the sites of the transfer cassette. An appropriate recombinase is provided and the transfer cassette is integrated at the target site. The polynucleotide of interest is thereby integrated at a specific chromosomal position in the plant genome. Other methods to target polynucleotides are set forth in WO 2009/114321 (herein incorporated by reference), which describes “custom” meganucleases produced to modify plant genomes, in particular the genome of maize. See, also, Gao et al. (2010) Plant Journal 1:176-187.

[0247] The cells that have been transformed may be grown into plants in accordance with conventional ways. See, for example, McCormick et al. (1986) Plant Cell Reports 5:81-84. These plants may then be grown, and either pollinated with the same transformed strain or different strains, and the resulting progeny having constitutive expression of the desired phenotypic characteristic identified. Two or more generations may be grown to ensure that expression of the desired phenotypic characteristic is stably maintained and inherited and then seeds harvested to ensure expression of the desired phenotypic characteristic has been achieved. In this manner, the present invention provides transformed seed (also referred to as “transgenic seed”) having a polynucleotide of the invention, for example, an expression cassette of the invention, stably incorporated into their genome.

[0248] Method of Detections

[0249] Methods for detecting a meganuclease polypeptide or an active variant or fragment thereof are provided. Such methods comprise analyzing plant tissues to detect such polypeptides or the polynucleotides encoding the same. The detection methods can directly assay for the presence of the meganuclease polypeptide or polynucleotide or the detection methods can indirectly assay for the sequences by assaying the phenotype of the cell, yeast, plant, plant cell or plant explant expressing the sequence.

[0250] In still other embodiments, the meganuclease polypeptide or active variant or fragment thereof can be detected in a plant tissue by detecting the presence of a polynucleotide encoding any of the various meganuclease polypeptides or active variants and fragments thereof. In one embodiment, the detection method comprises assaying plant tissue using PCR amplification.

[0251] As used herein, “primers” are isolated polynucleotides that are annealed to a complementary target DNA strand by nucleic acid hybridization to form a hybrid between the primer and the target DNA strand, then extended along the target DNA strand by a polymerase, e.g., a DNA polymerase. Primer pairs of the invention refer to their use for amplification of a target polynucleotide, e.g., by the polymerase chain reaction (PCR) or other conventional nucleic-acid amplification methods. “PCR” or “polymerase chain reaction” is a technique used for the amplification of specific DNA segments (see, U.S. Pat. Nos. 4,683,195 and 4,800,159; herein incorporated by reference).

[0252] Probes and primers are of sufficient nucleotide length to bind to the target DNA sequence and specifically detect and/or identify a polynucleotide encoding a meganuclease polypeptide or active variant or fragment thereof as describe elsewhere herein. It is recognized that the hybridization conditions or reaction conditions can be determined by the operator to achieve this result. This length may be of any length that is of sufficient length to be useful in a detection method of choice. Such probes and primers can hybridize specifically to a target sequence under high stringency hybridization conditions. Probes and primers according to embodiments of the present invention may have complete DNA sequence identity of contiguous nucleotides with the target sequence, although probes differing from the target DNA sequence and that retain the ability to specifically detect and/or identify a target DNA sequence may be designed by conventional methods. Accordingly, probes and primers can share about 80%, 85%, 90%, 91%, 92%, 93%, 94%, 95%, 96%, 97%, 98%, 99% or greater sequence identity or complementarity to the target polynucleotide.

[0253] Methods for preparing and using probes and primers are described, for example, in Molecular Cloning: A Laboratory Manual, 2.sup. nd ed, vol. 1-3, ed. Sambrook et al., Cold Spring Harbor Laboratory Press, Cold Spring Harbor, N.Y. 1989 (hereinafter, “Sambrook et al., 1989”); Current Protocols in Molecular Biology, ed. Ausubel et al., Greene Publishing and Wiley-Interscience, New York, 1992 (with periodic updates) (hereinafter, “Ausubel et al., 1992”); and Innis et al., PCR Protocols: A Guide to Methods and Applications, Academic Press: San Diego, 1990. PCR primer pairs can be derived from a known sequence, for example, by using computer programs intended for that purpose such as the PCR primer analysis tool in Vector NTI version 10 (Invitrogen); PrimerSelect (DNASTAR Inc., Madison, Wis.); and Primer (Version 0.5.COPYRGT., 1991, Whitehead Institute for Biomedical Research, Cambridge, Mass.). Additionally, the sequence can be visually scanned and primers manually identified using guidelines known to one of skill in the art.

### Method of Identifying Meganuclease Variants.

[0254] Various methods can be employed to identify further meganuclease variants. The polynucleotides of the invention are optionally used as substrates for a variety of diversity generating procedures, e.g., mutation, recombination and recursive recombination reactions, in addition to their use in standard cloning methods as set forth in, e.g., Ausubel, Berger and Sambrook, i.e., to produce additional meganuclease polynucleotides and polypeptides with desired properties. A variety of diversity generating protocols can be used. The procedures can be used separately, and/or in combination to produce one or more variants of a polynucleotide or set of polynucleotides, as well variants of encoded proteins. Individually and collectively, these procedures provide robust, widely applicable ways of generating diversified polynucleotides and sets of polynucleotides (including, e.g., polynucleotide libraries) useful, e.g., for the engineering or rapid evolution of polynucleotides, proteins, pathways, cells and/or organisms with new and/or improved characteristics. The process of altering the sequence can result in, for example, single nucleotide substitutions, multiple nucleotide substitutions, and insertion or deletion of regions of the nucleic acid sequence.

[0255] While distinctions and classifications are made in the course of the ensuing discussion for clarity, it will be appreciated that the techniques are often not mutually exclusive. Indeed, the various methods can be used singly or in combination, in parallel or in series, to access diverse sequence variants.

[0256] The terms “diversification” and “diversity,” as applied to a polynucleotide, refers to generation of a plurality of modified forms of a parental polynucleotide, or plurality of parental polynucleotides. In the case where the polynucleotide encodes a polypeptide, diversity in the nucleotide sequence of the polynucleotide can result in diversity in the corresponding encoded polypeptide, e.g. a diverse pool of polynucleotides encoding a plurality of polypeptide variants. In some embodiments of the invention, this sequence diversity is exploited by screening/selecting a library of diversified polynucleotides for variants with desirable functional attributes, e.g., a polynucleotide encoding a meganuclease with enhanced functional characteristics.

[0257] The result of any of the diversity generating procedures described herein can be the generation of one or more polynucleotides, which can be selected or screened for polynucleotides that encode proteins with or which confer desirable properties. Following diversification by one or more of the methods herein, or otherwise available to one of skill, any polynucleotides that are produced can be selected for a desired activity or property, e.g. altered Km, use of alternative cofactors, increased kcat, etc. This can include identifying any activity that can be detected, for example, in an automated or automatable format, by any of the assays in the art. For example, modified meganuclease polypeptides can be detected by assaying for a meganuclease activity. Assays to measure such activity are described elsewhere herein. A variety of related (or even unrelated) properties can be evaluated, in serial or in parallel, at the discretion of the practitioner.

[0258] Descriptions of a variety of diversity generating procedures, including family shuffling and methods for generating modified nucleic acid sequences encoding multiple enzymatic domains, are found in the following publications and the references cited therein: Soong N. et al. (2000) Nat Genet. 25(4):436-39; Stemmer et al. (1999) Tumor Targeting 4:1-4; Ness et al. (1999) Nature Biotechnology 17:893-896; Chang et al. (1999) Nature Biotechnology 17:793-797; Minshull and Stemmer (1999) Current Opinion in Chemical Biology 3:284-290; Christians et al. (1999) Nature Biotechnology 17:259-264; Crameri et al. (1998) Nature 391:288-291; Crameri et al. (1997) Nature Biotechnology 15:436-438; Zhang et al. (1997) Proc. Natl. Acad. Sci. USA 94:4504-4509; Patten et al. (1997) Current Opinion in Biotechnology 8:724-733; Crameri et al. (1996) Nature Medicine 2:100-103; Crameri et al. (1996) Nature Biotechnology 14:315-319; Gates et al. (1996) Journal of Molecular Biology 255:373-386; Stemmer (1996) “Sexual PCR and Assembly PCR” In: The Encyclopedia of Molecular Biology. VCH Publishers, New York. pp. 447-457; Crameri and Stemmer (1995) BioTechniques 18:194-195; Stemmer et al. (1995) Gene: 164:49-53; Stemmer (1995) Science 270: 1510; Stemmer (1995) Bio/Technology 13:549-553; Stemmer (1994) Nature 370:389-391; and Stemmer (1994) Proc. Natl. Acad. Sci. USA 91:10747-10751. See also WO2008/073877 and US 20070204369, both of which are herein incorporated by reference in their entirety.

[0259] Mutational methods of generating diversity include, for example, site-directed mutagenesis (Ling et al. (1997) Anal Biochem. 254(2): 157-178; Dale et al. (1996) Methods Mol. Biol. 57:369-374; Smith (1985) Ann. Rev. Genet. 19:423-462; Botstein & Shortle (1985) Science 229:1193-1201; Carter (1986) Biochem. J. 237:1-7; and Kunkel (1987) Nucleic Acids & Molecular Biology (Eckstein, F. and Lilley, D. M. J. eds., Springer Verlag, Berlin)); mutagenesis using uracil containing templates (Kunkel (1985) Proc. Natl. Acad. Sci. USA 82:488-492; Kunkel et al. (1987) Methods in Enzymol. 154, 367-382; and Bass et al. (1988) Science 242:240-245); oligonucleotide-directed mutagenesis (Methods in Enzymol. 100: 468-500 (1983); Methods in Enzymol. 154: 329-350 (1987); Zoller & Smith (1982) Nucleic Acids Res. 10:6487-6500; Zoller & Smith (1983) Methods in Enzymol. 100:468-500; and Zoller & Smith (1987) Methods in Enzymol. 154:329-350); phosphorothioate-modified DNA mutagenesis (Taylor et al. (1985) Nucl. Acids Res. 13: 8749-8764; Taylor et al. (1985) Nucl. Acids Res. 13: 8765-8787 (1985); Nakamaye & Eckstein (1986) Nucl. Acids Res. 14: 9679-9698; Sayers et al. (1988) Nucl. Acids Res. 16:791-802; and Sayers et al. (1988) Nucl. Acids Res. 16: 803-814); mutagenesis using gapped duplex DNA (Kramer et al. (1984) Nucl. Acids Res. 12: 9441-9456; Kramer & Fritz (1987) Methods in Enzymol. 154:350-367; Kramer et al. (1988) Nucl. Acids Res. 16: 7207; and Fritz et al. (1988) Nucl. Acids Res. 16: 6987-6999).

[0260] Additional suitable methods include, but are not limited to, point mismatch repair (Kramer et al. (1984) Cell 38:879-887), mutagenesis using repair-deficient host strains (Carter et al. (1985) Nucl. Acids Res. 13: 4431-4443; and Carter (1987) Methods in Enzymol. 154: 382-403), deletion mutagenesis (Eghtedarzadeh & Henikoff (1986) Nucl. Acids Res. 14: 5115), restriction-selection and restriction-purification (Wells et al. (1986) Phil. Trans. R. Soc. Lond. A 317: 415-423), mutagenesis by total gene synthesis (Nambiar et al. (1984) Science 223: 1299-1301; Sakamar and Khorana (1988) Nucl. Acids Res. 14: 6361-6372; Wells et al. (1985) Gene 34:315-323; and Grundstrom et al. (1985) Nucl. Acids Res. 13: 3305-3316), and double-strand break repair (Mandecki (1986); Arnold (1993) Current Opinion in Biotechnology 4:450-455 and Proc. Natl. Acad. Sci. USA, 83:7177-7181). Additional details on many of the above methods can be found in Methods in Enzymology Volume 154, which also describes useful controls for trouble-shooting problems with various mutagenesis methods.

[0261] Additional details regarding various diversity generating methods can be found in the following U.S. patents, PCT publications, and EPO publications: U.S. Pat. No. 5,605,793, U.S. Pat. No. 5,811,238, U.S. Pat. No. 5,830,721, U.S. Pat. No. 5,834,252, U.S. Pat. No. 5,837,458, WO 95/22625, WO 96/33207, WO 97/20078, WO 97/35966, WO 99/41402, WO 99/41383, WO 99/41369, WO 99/41368, EP 752008, EP 0932670, WO 99/23107, WO 99/21979, WO 98/31837, WO 98/27230, WO 98/13487, WO 00/00632, WO 00/09679, WO 98/42832, WO 99/29902, WO 98/41653, WO 98/41622, WO 98/42727, WO 00/18906, WO 00/04190, WO 00/42561, WO 00/42559, WO 00/42560, WO 01/23401, and, PCT/US01/06775. See, also WO20074303, herein incorporated by reference.

[0262] In brief, several different general classes of sequence modification methods, such as mutation, recombination, etc. are applicable to the present invention and set forth, e.g., in the references above. That is, alterations to the component nucleic acid sequences to produced modified gene fusion constructs can be performed by any number of the protocols described, either before cojoining of the sequences, or after the cojoining step. The following exemplify some of the different types of preferred formats for diversity generation in the context of the present invention, including, e.g., certain recombination based diversity generation formats.

[0263] Nucleic acids can be recombined in vitro by any of a variety of techniques discussed in the references above, including e.g., DNAse digestion of nucleic acids to be recombined followed by ligation and/or PCR reassembly of the nucleic acids. For example, sexual PCR mutagenesis can be used in which random (or pseudo random, or even non-random) fragmentation of the DNA molecule is followed by recombination, based on sequence similarity, between DNA molecules with different but related DNA sequences, in vitro, followed by fixation of the crossover by extension in a polymerase chain reaction. This process and many process variants are described in several of the references above, e.g., in Stemmer (1994) Proc. Natl. Acad. Sci. USA 91:10747-10751.

[0264] Similarly, nucleic acids can be recursively recombined in vivo, e.g., by allowing recombination to occur between nucleic acids in cells. Many such in vivo recombination formats are set forth in the references noted above. Such formats optionally provide direct recombination between nucleic acids of interest, or provide recombination between vectors, viruses, plasmids, etc., comprising the nucleic acids of interest, as well as other formats. Details regarding such procedures are found in the references noted above.

[0265] Whole genome recombination methods can also be used in which whole genomes of cells or other organisms are recombined, optionally including spiking of the genomic recombination mixtures with desired library components (e.g., genes corresponding to the pathways of the present invention). These methods have many applications, including those in which the identity of a target gene is not known. Details on such methods are found, e.g., in WO 98/31837 and in PCT/US99/15972. Thus, any of these processes and techniques for recombination, recursive recombination, and whole genome recombination, alone or in combination, can be used to generate the modified nucleic acid sequences and/or modified gene fusion constructs of the present invention.

[0266] Synthetic recombination methods can also be used, in which oligonucleotides corresponding to targets of interest are synthesized and reassembled in PCR or ligation reactions which include oligonucleotides which correspond to more than one parental nucleic acid, thereby generating new recombined nucleic acids. Oligonucleotides can be made by standard nucleotide addition methods, or can be made, e.g., by tri-nucleotide synthetic approaches. Details regarding such approaches are found in the references noted above, including, e.g., WO 00/42561, WO 01/23401, WO 00/42560, and, WO 00/42559.

[0267] In silico methods of recombination can be affected in which genetic algorithms are used in a computer to recombine sequence strings which correspond to homologous (or even non-homologous) nucleic acids. The resulting recombined sequence strings are optionally converted into nucleic acids by synthesis of nucleic acids which correspond to the recombined sequences, e.g., in concert with oligonucleotide synthesis/gene reassembly techniques. This approach can generate random, partially random or designed variants. Many details regarding in silico recombination, including the use of genetic algorithms, genetic operators and the like in computer systems, combined with generation of corresponding nucleic acids (and/or proteins), as well as combinations of designed nucleic acids and/or proteins (e.g., based on cross-over site selection) as well as designed, pseudo-random or random recombination methods are described in WO 00/42560 and WO 00/42559.

[0268] Many methods of accessing natural diversity, e.g., by hybridization of diverse nucleic acids or nucleic acid fragments to single-stranded templates, followed by polymerization and/or ligation to regenerate full-length sequences, optionally followed by degradation of the templates and recovery of the resulting modified nucleic acids can be similarly used. In one method employing a single-stranded template, the fragment population derived from the genomic library(ies) is annealed with partial, or, often approximately full length ssDNA or RNA corresponding to the opposite strand. Assembly of complex chimeric genes from this population is then mediated by nuclease-base removal of non-hybridizing fragment ends, polymerization to fill gaps between such fragments and subsequent single stranded ligation. The parental polynucleotide strand can be removed by digestion (e.g., if RNA or uracil-containing), magnetic separation under denaturing conditions (if labeled in a manner conducive to such separation) and other available separation/purification methods. Alternatively, the parental strand is optionally co-purified with the chimeric strands and removed during subsequent screening and processing steps. Additional details regarding this approach are found, e.g., in PCT/US01/06775.

[0269] In another approach, single-stranded molecules are converted to double-stranded DNA (dsDNA) and the dsDNA molecules are bound to a solid support by ligand-mediated binding. After separation of unbound DNA, the selected DNA molecules are released from the support and introduced into a suitable host cell to generate a library enriched sequences which hybridize to the probe. A library produced in this manner provides a desirable substrate for further diversification using any of the procedures described herein.

[0270] Any of the preceding general recombination formats can be practiced in a reiterative fashion (e.g., one or more cycles of mutation/recombination or other diversity generation methods, optionally followed by one or more selection methods) to generate a more diverse set of recombinant nucleic acids.

[0271] Mutagenesis employing polynucleotide chain termination methods have also been proposed (see e.g., U.S. Pat. No. 5,965,408 and the references above), and can be applied to the present invention. In this approach, double stranded DNAs corresponding to one or more genes sharing regions of sequence similarity are combined and denatured, in the presence or absence of primers specific for the gene. The single stranded polynucleotides are then annealed and incubated in the presence of a polymerase and a chain terminating reagent (e.g., ultraviolet, gamma or X-ray irradiation; ethidium bromide or other intercalators; DNA binding proteins, such as single strand binding proteins, transcription activating factors, or histones; polycyclic aromatic hydrocarbons; trivalent chromium or a trivalent chromium salt; or abbreviated polymerization mediated by rapid thermocycling; and the like), resulting in the production of partial duplex molecules. The partial duplex molecules, e.g., containing partially extended chains, are then denatured and reannealed in subsequent rounds of replication or partial replication resulting in polynucleotides which share varying degrees of sequence similarity and which are diversified with respect to the starting population of DNA molecules. Optionally, the products, or partial pools of the products, can be amplified at one or more stages in the process. Polynucleotides produced by a chain termination method, such as described above, are suitable substrates for any other described recombination format.

[0272] Diversity also can be generated in nucleic acids or populations of nucleic acids using a recombinational procedure termed “incremental truncation for the creation of hybrid enzymes” (“ITCHY”) described in Ostermeier et al. (1999) Nature Biotech 17:1205. This approach can be used to generate an initial a library of variants which can optionally serve as a substrate for one or more in vitro or in vivo recombination methods. See, also, Ostermeier et al. (1999) Proc. Natl. Acad. Sci. USA, 96: 3562-67; Ostermeier et al. (1999), Biological and Medicinal Chemistry 7: 2139-44.

[0273] Mutational methods which result in the alteration of individual nucleotides or groups of contiguous or non-contiguous nucleotides can be favorably employed to introduce nucleotide diversity into the nucleic acid sequences and/or gene fusion constructs of the present invention. Many mutagenesis methods are found in the above-cited references; additional details regarding mutagenesis methods can be found in following, which can also be applied to the present invention.

[0274] For example, error-prone PCR can be used to generate nucleic acid variants. Using this technique, PCR is performed under conditions where the copying fidelity of the DNA polymerase is low, such that a high rate of point mutations is obtained along the entire length of the PCR product. Examples of such techniques are found in the references above and, e.g., in Leung et al. (1989) Technique 1:11-15 and Caldwell et al. (1992) PCR Methods Applic. 2:28-33. Similarly, assembly PCR can be used, in a process which involves the assembly of a PCR product from a mixture of small DNA fragments. A large number of different PCR reactions can occur in parallel in the same reaction mixture, with the products of one reaction priming the products of another reaction.

[0275] Oligonucleotide directed mutagenesis can be used to introduce site-specific mutations in a nucleic acid sequence of interest. Examples of such techniques are found in the references above and, e.g., in Reidhaar-Olson et al. (1988) Science 241:53-57. Similarly, cassette mutagenesis can be used in a process that replaces a small region of a double stranded DNA molecule with a synthetic oligonucleotide cassette that differs from the native sequence. The oligonucleotide can contain, e.g., completely and/or partially randomized native sequence(s).

[0276] Recursive ensemble mutagenesis is a process in which an algorithm for protein mutagenesis is used to produce diverse populations of phenotypically related mutants, members of which differ in amino acid sequence. This method uses a feedback mechanism to monitor successive rounds of combinatorial cassette mutagenesis. Examples of this approach are found in Arkin & Youvan (1992) Proc. Natl. Acad. Sci. USA 89:7811-7815.

[0277] Exponential ensemble mutagenesis can be used for generating combinatorial libraries with a high percentage of unique and functional mutants. Small groups of residues in a sequence of interest are randomized in parallel to identify, at each altered position, amino acids which lead to functional proteins. Examples of such procedures are found in Delegrave & Youvan (1993) Biotechnology Research 11:1548-1552.

[0278] In vivo mutagenesis can be used to generate random mutations in any cloned DNA of interest by propagating the DNA, e.g., in a strain of E. coli that carries mutations in one or more of the DNA repair pathways. These “mutator” strains have a higher random mutation rate than that of a wild-type parent. Propagating the DNA in one of these strains will eventually generate random mutations within the DNA. Such procedures are described in the references noted above.

[0279] Other procedures for introducing diversity into a genome, e.g. a bacterial, fungal, animal or plant genome can be used in conjunction with the above described and/or referenced methods. For example, in addition to the methods above, techniques have been proposed which produce nucleic acid multimers suitable for transformation into a variety of species (see, e.g., U.S. Pat. No. 5,756,316 and the references above). Transformation of a suitable host with such multimers, consisting of genes that are divergent with respect to one another, (e.g., derived from natural diversity or through application of site directed mutagenesis, error prone PCR, passage through mutagenic bacterial strains, and the like), provides a source of nucleic acid diversity for DNA diversification, e.g., by an in vivo recombination process as indicated above.

[0280] Alternatively, a multiplicity of monomeric polynucleotides sharing regions of partial sequence similarity can be transformed into a host species and recombined in vivo by the host cell. Subsequent rounds of cell division can be used to generate libraries, members of which, include a single, homogenous population, or pool of monomeric polynucleotides. Alternatively, the monomeric nucleic acid can be recovered by standard techniques, e.g., PCR and/or cloning, and recombined in any of the recombination formats, including recursive recombination formats, described above.

[0281] Methods for generating multispecies expression libraries have been described (in addition to the reference noted above, see, e.g., U.S. Pat. No. 5,783,431 and U.S. Pat. No. 5,824,485) and their use to identify protein activities of interest has been proposed (In addition to the references noted above, see, U.S. Pat. No. 5,958,672. Multispecies expression libraries include, in general, libraries comprising cDNA or genomic sequences from a plurality of species or strains, operably linked to appropriate regulatory sequences, in an expression cassette. The cDNA and/or genomic sequences are optionally randomly ligated to further enhance diversity. The vector can be a shuttle vector suitable for transformation and expression in more than one species of host organism, e.g., bacterial species, eukaryotic cells. In some cases, the library is biased by preselecting sequences which encode a protein of interest, or which hybridize to a nucleic acid of interest. Any such libraries can be provided as substrates for any of the methods herein described.

[0282] The above described procedures have been largely directed to increasing nucleic acid and/or encoded protein diversity. However, in many cases, not all of the diversity is useful, e.g., functional, and contributes merely to increasing the background of variants that must be screened or selected to identify the few favorable variants. In some applications, it is desirable to preselect or prescreen libraries (e.g., an amplified library, a genomic library, a cDNA library, a normalized library, etc.) or other substrate nucleic acids prior to diversification, e.g., by recombination-based mutagenesis procedures, or to otherwise bias the substrates towards nucleic acids that encode functional products. For example, in the case of antibody engineering, it is possible to bias the diversity generating process toward antibodies with functional antigen binding sites by taking advantage of in vivo recombination events prior to manipulation by any of the described methods. For example, recombined CDRs derived from B cell cDNA libraries can be amplified and assembled into framework regions (e.g., Jirholt et al. (1998) Gene 215: 471) prior to diversifying according to any of the methods described herein.

[0283] Libraries can be biased towards nucleic acids which encode proteins with desirable enzyme activities. For example, after identifying a variant from a library which exhibits a specified activity, the variant can be mutagenized using any known method for introducing DNA alterations. A library comprising the mutagenized homologues is then screened for a desired activity, which can be the same as or different from the initially specified activity. An example of such a procedure is proposed in U.S. Pat. No. 5,939,250. Desired activities can be identified by any method known in the art. For example, WO 99/10539 proposes that gene libraries can be screened by combining extracts from the gene library with components obtained from metabolically rich cells and identifying combinations which exhibit the desired activity. It has also been proposed (e.g., WO 98/58085) that clones with desired activities can be identified by inserting bioactive substrates into samples of the library, and detecting bioactive fluorescence corresponding to the product of a desired activity using a fluorescent analyzer, e.g., a flow cytometry device, a CCD, a fluorometer, or a spectrophotometer.

[0284] Libraries can also be biased towards nucleic acids which have specified characteristics, e.g., hybridization to a selected nucleic acid probe. For example, application WO 99/10539 proposes that polynucleotides encoding a desired activity (e.g., an enzymatic activity, for example: a lipase, an esterase, a protease, a glycosidase, a glycosyl transferase, a phosphatase, a kinase, an oxygenase, a peroxidase, a hydrolase, a hydratase, a nitrilase, a transaminase, an amidase or an acylase) can be identified from among genomic DNA sequences in the following manner. Single stranded DNA molecules from a population of genomic DNA are hybridized to a ligand-conjugated probe. The genomic DNA can be derived from either a cultivated or uncultivated microorganism, or from an environmental sample. Alternatively, the genomic DNA can be derived from a multicellular organism, or a tissue derived there from. Second strand synthesis can be conducted directly from the hybridization probe used in the capture, with or without prior release from the capture medium or by a wide variety of other strategies known in the art. Alternatively, the isolated single-stranded genomic DNA population can be fragmented without further cloning and used directly in, e.g., a recombination-based approach, that employs a single-stranded template, as described above.

[0285] “Non-Stochastic” methods of generating nucleic acids and polypeptides are found in WO 00/46344. These methods, including proposed non-stochastic polynucleotide reassembly and site-saturation mutagenesis methods be applied to the present invention as well. Random or semi-random mutagenesis using doped or degenerate oligonucleotides is also described in, e.g., Arkin and Youvan (1992) Biotechnology 10:297-300; Reidhaar-Olson et al. (1991) Methods Enzymol. 208:564-86; Lim and Sauer (1991) J. Mol. Biol. 219:359-76; Breyer and Sauer (1989) J. Biol. Chem. 264:13355-60); and U.S. Pat. Nos. 5,830,650 and 5,798,208, and EP Patent 0527809 B1.

[0286] It will readily be appreciated that any of the above described techniques suitable for enriching a library prior to diversification can also be used to screen the products, or libraries of products, produced by the diversity generating methods. Any of the above described methods can be practiced recursively or in combination to alter nucleic acids, e.g., meganuclease encoding polynucleotides.

[0287] The above references provide many mutational formats, including recombination, recursive recombination, recursive mutation and combinations or recombination with other forms of mutagenesis, as well as many modifications of these formats. Regardless of the diversity generation format that is used, the nucleic acids of the present invention can be recombined (with each other, or with related (or even unrelated) sequences) to produce a diverse set of recombinant nucleic acids for use in the gene fusion constructs and modified gene fusion constructs of the present invention, including, e.g., sets of homologous nucleic acids, as well as corresponding polypeptides.

[0288] Many of the above-described methodologies for generating modified polynucleotides generate a large number of diverse variants of a parental sequence or sequences. In some embodiments, the modification technique (e.g., some form of shuffling) is used to generate a library of variants that is then screened for a modified polynucleotide or pool of modified polynucleotides encoding some desired functional attribute, e.g., increased meganuclease activity.

[0289] For convenience and high throughput it will often be desirable to screen/select for desired modified nucleic acids in a microorganism, e.g., a bacteria such as E. coli. On the other hand, screening in plant cells or plants can in some cases be preferable where the ultimate aim is to generate a modified nucleic acid for expression in a plant system.

[0290] In some preferred embodiments of the invention throughput is increased by screening pools of host cells expressing different modified nucleic acids, either alone or as part of a gene fusion construct. Any pools showing significant activity can be deconvoluted to identify single variants expressing the desirable activity.

[0291] In high throughput assays, it is possible to screen up to several thousand different variants in a single day. For example, each well of a microtiter plate can be used to run a separate assay, or, if concentration or incubation time effects are to be observed, every 5-10 wells can test a single variant.

[0292] In addition to fluidic approaches, it is possible, as mentioned above, simply to grow cells on media plates that select for the desired enzymatic or metabolic function. This approach offers a simple and high-throughput screening method.

[0293] A number of well known robotic systems have also been developed for solution phase chemistries useful in assay systems. These systems include automated workstations like the automated synthesis apparatus developed by Takeda Chemical Industries, LTD. (Osaka, Japan) and many robotic systems utilizing robotic arms (Zymate II, Zymark Corporation, Hopkinton, Mass.; Orca, Hewlett-Packard, Palo Alto, Calif.) which mimic the manual synthetic operations performed by a scientist. Any of the above devices are suitable for application to the present invention. The nature and implementation of modifications to these devices (if any) so that they can operate as discussed herein with reference to the integrated system will be apparent to persons skilled in the relevant art.

[0294] High throughput screening systems are commercially available (see, e.g., Zymark Corp., Hopkinton, Mass.; Air Technical Industries, Mentor, Ohio; Beckman Instruments, Inc. Fullerton, Calif.; Precision Systems, Inc., Natick, Mass., etc.). These systems typically automate entire procedures including all sample and reagent pipetting, liquid dispensing, timed incubations, and final readings of the microplate in detector(s) appropriate for the assay. These configurable systems provide high throughput and rapid start up as well as a high degree of flexibility and customization.

[0295] The manufacturers of such systems provide detailed protocols for the various high throughput devices. Thus, for example, Zymark Corp. provides technical bulletins describing screening systems for detecting the modulation of gene transcription, ligand binding, and the like. Microfluidic approaches to reagent manipulation have also been developed, e.g., by Caliper Technologies (Mountain View, Calif.).

### Yeast and Plants

[0296] Yeast, plants, plant cells, plant parts and seeds, and grain having the meganuclease sequences disclosed herein are provided. In specific embodiments, the yeast, plants and/or plant parts have stably incorporated at least one heterologous meganuclease polypeptide disclosed herein or an active variant or fragment thereof. Thus, yeast, plants, plant cells, plant parts and seed are provided which comprise at least one heterologous meganuclease sequences of any one of SEQ ID NOs: 14, 15, 16, 17, 18, 19, 20, 21, 22, 23, 24, 25, 26, 27, 28, 29, 30, 31, 32, 33, 34, 35, 36, 37, 38, 87, 88, 89, 90, 91, 92, 93, 94, 95, 96, 97, 98, 99, 100, 101, 102, 103, 104, 105, 106, 107, 108, 109, 110, 111, 112, 113, 114, 115, 116, 117, 118, 119, 120, 121, 122, 123, 124, 125, 126, 127, 128, 129, 130, 131, 132, 133, 134, 135, 136, 137, 138, 139, 140, 141, 142, 143, 144, 145, 146, 147, 148, 149, 150, 151, 152, 153, 154, 155, 156, 157, 158, 159, 160, 161, 162, 163, 164, 165, 166, 167, 251, 252, 253, 262, 272, 273, 274, 275, 284, 285, 286, 287, 288, 289, 290, 291, 292, 293, 294, 295, 296, 297, 298, 315, 316, 317, 318, 319, 320, 330, 331, 332, 334, 335, 336, 337, 338, 339, 340, 341, 357, 358, 359, 360, 361, 362, 363, 364, 365, 366, 367, 368, 369, 370, 370, 371, 390, 391, 392, 393, 394, 395, 396, 397, 398, 399, 400, 401, 402 or 403 or any one of other variants disclosed herein, such as those in Example 3-23 or a biologically active fragment and/or variant of the meganuclease sequence. In specific embodiments, the meganuclease sequences are characterized as having meganuclease activity.

[0297] In specific embodiments, the heterologous polynucleotide in the plant or plant part is operably linked to a constitutive, tissue-preferred, or other promoter for expression in plants.

[0298] The yeast, plant cell, plant, plant part and seed can comprise any of the recognition sequence provided herein. For example, the recognition site can be selected from the group consisting of the LIG3-4 (SEQ ID NO: 2), MHP77 (SEQ ID NO: 85), MS26 (SEQ ID NO: 269), MHP14 (SEQ ID NO: 281), MP107 (SEQ ID NO: 328), ZM6.3 (SEQ ID NO: 355), ZM6.22V2 (SEQ ID NO: 388), TS21 (SEQ ID NO: 423) and/or TS14 (SEQ ID NO: 424) recognition sequences or an active variant thereof.

[0299] As used herein, the term plant includes plant cells, plant protoplasts, plant cell tissue cultures from which plants can be regenerated, plant calli, plant clumps, and plant cells that are intact in plants or parts of plants such as embryos, pollen, ovules, seeds, leaves, flowers, branches, fruit, kernels, ears, cobs, husks, stalks, roots, root tips, anthers, and the like. Grain is intended to mean the mature seed produced by commercial growers for purposes other than growing or reproducing the species. Progeny, variants, and mutants of the regenerated plants are also included within the scope of the invention, provided that these parts comprise the introduced polynucleotides.

[0300] A transformed plant or transformed plant cell provided herein is one in which genetic alteration, such as transformation, has been affected as to a gene of interest, or is a plant or plant cell which is descended from a plant or cell so altered and which comprises the alteration. A “transgene” is a gene that has been introduced into the genome by a transformation procedure. Accordingly, a “transgenic plant” is a plant that contains a transgene, whether the transgene was introduced into that particular plant by transformation or by breeding; thus, descendants of an originally-transformed plant are encompassed by the definition. A “control” or “control plant” or “control plant cell” provides a reference point for measuring changes in phenotype of the subject plant or plant cell. A control plant or plant cell may comprise, for example: (a) a wild-type plant or cell, i.e., of the same genotype as the starting material for the genetic alteration which resulted in the subject plant or cell; (b) a plant or plant cell of the same genotype as the starting material but which has been transformed with a null construct (i.e., with a construct which does not express the transgene, such as a construct comprising a marker gene); (c) a plant or plant cell which is a non-transformed segregant among progeny of a subject plant or plant cell; (d) a plant or plant cell genetically identical to the subject plant or plant cell but which is not exposed to conditions or stimuli that would induce expression of the transgene; or (e) the subject plant or plant cell itself, under conditions in which the construct is not expressed.

[0301] Plant cells that have been transformed to express a meganuclease provided herein can be grown into whole plants. The regeneration, development, and cultivation of plants from single plant protoplast transformants or from various transformed explants is well known in the art. See, for example, McCormick et al. (1986) Plant Cell Reports 5:81-84; Weissbach and Weissbach, In: Methods for Plant Molecular Biology, (Eds.), Academic Press, Inc. San Diego, Calif., (1988). This regeneration and growth process typically includes the steps of selection of transformed cells, culturing those individualized cells through the usual stages of embryonic development through the rooted plantlet stage. Transgenic embryos and seeds are similarly regenerated. The resulting transgenic rooted shoots are thereafter planted in an appropriate plant growth medium such as soil. Preferably, the regenerated plants are self-pollinated to provide homozygous transgenic plants. Otherwise, pollen obtained from the regenerated plants is crossed to seed-grown plants of agronomically important lines. Conversely, pollen from plants of these important lines is used to pollinate regenerated plants. Two or more generations may be grown to ensure that expression of the desired phenotypic characteristic is stably maintained and inherited and then seeds harvested to ensure expression of the desired phenotypic characteristic has been achieved. In this manner, the compositions presented herein provide transformed seed (also referred to as “transgenic seed”) having a polynucleotide provided herein, for example, a target site, stably incorporated into their genome.

[0302] The meganuclease sequences and active variant and fragments thereof disclosed herein may be used for transformation of any plant species, including, but not limited to, monocots and dicots. Examples of plant species of interest include, but are not limited to, corn (Zea mays), Brassica sp. (e.g., B. napus, B. rapa, B. juncea), particularly those Brassica species useful as sources of seed oil, alfalfa (Medicago sativa), rice (Oryza sativa), rye (Secale cereale), sorghum (Sorghum bicolor, Sorghum vulgare), millet (e.g., pearl millet (Pennisetum glaucum), proso millet (Panicum miliaceum), foxtail millet (Setaria italica), finger millet (Eleusine coracana)), sunflower (Helianthus annuus), safflower (Carthamus tinctorius), wheat (Triticum aestivum), soybean (Glycine max), tobacco (Nicotiana tabacum), potato (Solanum tuberosum), peanuts (Arachis hypogaea), cotton (Gossypium barbadense, Gossypium hirsutum), sweet potato (Ipomoea batatus), cassava (Manihot esculenta), coffee (Coffea spp.), coconut (Cocos nucifera), pineapple (Ananas comosus), citrus trees (Citrus spp.), cocoa (Theobroma cacao), tea (Camellia sinensis), banana (Musa spp.), avocado (Persea americana), fig (Ficus casica), guava (Psidium guajava), mango (Mangifera indica), olive (Olea europaea), papaya (Carica papaya), cashew (Anacardium occidentale), macadamia (Macadamia integrifolia), almond (Prunus amygdalus), sugar beets (Beta vulgaris), sugarcane (Saccharum spp.), oats, barley, vegetables, ornamentals, and conifers.

[0303] Vegetables include tomatoes (Lycopersicon esculentum), lettuce (e.g., Lactuca sativa), green beans (Phaseolus vulgaris), lima beans (Phaseolus limensis), peas (Lathyrus spp.), and members of the genus Cucumis such as cucumber (C. sativus), cantaloupe (C. cantalupensis), and musk melon (C. melo). Ornamentals include azalea (Rhododendron spp.), hydrangea (Macrophylla hydrangea), hibiscus (Hibiscus rosasanensis), roses (Rosa spp.), tulips (Tulipa spp.), daffodils (Narcissus spp.), petunias (Petunia hybrida), carnation (Dianthus caryophyllus), poinsettia (Euphorbia pulcherrima), and chrysanthemum.

[0304] Conifers that may be employed in practicing the present invention include, for example, pines such as loblolly pine (Pinus taeda), slash pine (Pinus elliotii), ponderosa pine (Pinus ponderosa), lodgepole pine (Pinus contorta), and Monterey pine (Pinus radiata); Douglas-fir (Pseudotsuga menziesii); Western hemlock (Tsuga canadensis); Sitka spruce (Picea glauca); redwood (Sequoia sempervirens); true firs such as silver fir (Abies amabilis) and balsam fir (Abies balsamea); and cedars such as Western red cedar (Thuja plicata) and Alaska yellow-cedar (Chamaecyparis nootkatensis), and Poplar and Eucalyptus. In specific embodiments, plants of the present invention are crop plants (for example, corn, alfalfa, sunflower, Brassica, soybean, cotton, safflower, peanut, sorghum, wheat, millet, tobacco, etc.). In other embodiments, corn and soybean plants are optimal, and in yet other embodiments corn plants are optimal.

[0305] Other plants of interest include grain plants that provide seeds of interest, oil-seed plants, and leguminous plants. Seeds of interest include grain seeds, such as corn, wheat, barley, rice, sorghum, rye, etc. Oil-seed plants include cotton, soybean, safflower, sunflower, Brassica, maize, alfalfa, palm, coconut, etc. Leguminous plants include beans and peas. Beans include guar, locust bean, fenugreek, soybean, garden beans, cowpea, mungbean, lima bean, fava bean, lentils, chickpea, etc.

Non-limiting examples of compositions and methods disclosed herein are as follows:
1. An isolated or recombinant polynucleotide comprising a nucleotide sequence encoding a meganuclease polypeptide, said polypeptide comprising:
[0306] a) an amino acid sequence having at least one amino acid modification at an amino acid position corresponding to a position of SEQ ID NO:1 selected from the group consisting of positions 2, 12, 16, 22, 23, 31, 36, 43, 50, 56, 58, 59, 62, 71, 72, 73, 80, 81, 82, 86, 91, 95, 98, 103, 113, 114, 116, 117, 118, 121, 124, 128, 129, 131, 147, 151, 153, 159, 160, 161, 162, 163, 164, 165, 166, 167, 168, 169, 170, 171, 172, 173, 174, 175, 176, 177, 178, 179, 180, 182, 183, 184, 185, 186, 187, 188, 189, 190, 191, 192, 194, 195, 196, 197, 200, 203, 204, 209, 222, 232, 236, 237, 246, 254, 258, 267, 278, 281, 282, 289, 308, 311, 312, 316, 318, 319, 334, 339, 340, 342, 345, 346, 348 and combinations thereof; or,
[0307] b) an amino acid sequence having at least 1, 2, 3, 4, 5, 6, 7, 8, 9, 10, 11, 12, 13, 14, 15, 16, 17, 18, 19, 20, 21, 22, 23, 24, 25, 26, 27, 28, 29, 30, 31, 32, 33, 34, 35, 36, 37, 38, 39, 40, 41, 42, 43 or 44 of any of the amino acid modification of (a);
   2. The isolated or recombinant polynucleotide of embodiment 1, wherein said nucleotide sequence encodes a meganuclease polypeptide having at least 80%, 81, %, 82%, 83%, 84%, 85%, 86%, 87%, 88%, 89%, 90%, 91%, 92%, 93%, 94%, 95%, 96%, 97%, 98%, 99% sequence identity to SEQ ID NO: 1.
   3. The isolated or recombinant polynucleotide of embodiment 1, wherein said at least one amino acid modification comprises;
[0308] a) an aspartic acid (D) at a position corresponding to amino acid position 2 in SEQ ID NO: 1;
[0309] b) a histidine (H) at a position corresponding to amino acid position 12 in SEQ ID NO: 1;
[0310] c) an isoleucine (I) at a position corresponding to amino acid position 16 in SEQ ID NO: 1;
[0311] d) a cysteine (C) at a position corresponding to amino acid position 22 in SEQ ID NO: 1;
[0312] e) a leucine (L) at a position corresponding to amino acid position 23 in SEQ ID NO: 1;
[0313] f) an arginine (R) at a position corresponding to amino acid position 31 in SEQ ID NO: 1;
[0314] g) an asparagine (N) at a position corresponding to amino acid position 36 in SEQ ID NO: 1;
[0315] h) a leucine (L) at a position corresponding to amino acid position 43 in SEQ ID NO: 1;
[0316] i) an arginine (R) or lysine (K) at a position corresponding to amino acid position 50 in SEQ ID NO: 1;
[0317] j) a leucine (L) at a position corresponding to amino acid position 56 in SEQ ID NO: 1;
[0318] k) an isoleucine (I) at a position corresponding to amino acid position 58 in SEQ ID NO: 1;
[0319] l) a histidine (H) or alanine (A) at a position corresponding to amino acid position 59 in SEQ ID NO: 1;
[0320] m) a valine (V) at a position corresponding to amino acid position 62 in SEQ ID NO: 1;
[0321] n) a lysine (K) at a position corresponding to amino acid position 71 in SEQ ID NO: 1;
[0322] o) a threonine (T) at a position corresponding to amino acid position 72 in SEQ ID NO: 1;
[0323] p) an alanine (A) at a position corresponding to amino acid position 73 in SEQ ID NO: 1;
[0324] q) an arginine (R) at a position corresponding to amino acid position 80 in SEQ ID NO: 1;
[0325] r) a lysine (K) at a position corresponding to amino acid position 81 in SEQ ID NO: 1;
[0326] s) an arginine (R) at a position corresponding to amino acid position 82 in SEQ ID NO: 1;
[0327] t) an aspartic acid (D) at a position corresponding to amino acid position 86 in SEQ ID NO: 1;
[0328] u) an isoleucine (I) at a position corresponding to amino acid position 91 in SEQ ID NO: 1;
[0329] v) an isoleucine (I) at a position corresponding to amino acid position 95 in SEQ ID NO: 1;
[0330] w) an arginine (R) at a position corresponding to amino acid position 98 in SEQ ID NO: 1;
[0331] x) a valine (V) at a position corresponding to amino acid position 103 in SEQ ID NO: 1;
[0332] y) a serine (S) at a position corresponding to amino acid position 113 in SEQ ID NO: 1;
[0333] z) a proline (P) at a position corresponding to amino acid position 114 in SEQ ID NO: 1;
[0334] aa) an arginine (R) at a position corresponding to amino acid position 116 in SEQ ID NO: 1;
[0335] bb) a glycine (G) at a position corresponding to amino acid position 117 in SEQ ID NO: 1;
[0336] cc) a threonine (T) at a position corresponding to amino acid position 118 in SEQ ID NO: 1;
[0337] dd) a an glycine (G) at a position corresponding to amino acid position 121 in SEQ ID NO: 1;
[0338] ee) an arginine (R) at a position corresponding to amino acid position 124 in SEQ ID NO: 1;
[0339] ff) a cysteine (C) at a position corresponding to amino acid position 128 in SEQ ID NO: 1;
[0340] gg) an alanine (A) at a position corresponding to amino acid position 129 in SEQ ID NO: 1;
[0341] hh) an arginine (R) at a position corresponding to amino acid position 131 in SEQ ID NO: 1;
[0342] ii) a serine (S) at a position corresponding to amino acid position 147 in SEQ ID NO: 1;
[0343] jj) an alanine (A) at a position corresponding to amino acid position 151 in SEQ ID NO: 1;
[0344] kk) a leucine (L) or a methionine (M) at a position corresponding to amino acid position 153 in SEQ ID NO: 1;
[0345] ll) a tryptophan (W) at a position corresponding to amino acid position 159 in SEQ ID NO: 1;
[0346] mm) a glutamic acid (E) at a position corresponding to amino acid position 160 in SEQ ID NO: 1;
[0347] nn) a valine (V) at a position corresponding to amino acid position 161 in SEQ ID NO: 1;
[0348] oo) a tyrosine (Y) at a position corresponding to amino acid position 162 in SEQ ID NO: 1;
[0349] pp) an arginine (R) at a position corresponding to amino acid position 163 in SEQ ID NO: 1;
[0350] qq) a histidine (H) at a position corresponding to amino acid position 164 in SEQ ID NO: 1;
[0351] rr) a leucine (L) at a position corresponding to amino acid position 165 in SEQ ID NO: 1;
[0352] ss) an arginine (R) at a position corresponding to amino acid position 166 in SEQ ID NO: 1;
[0353] tt) a histidine (H) at a position corresponding to amino acid position 167 in SEQ ID NO: 1;
[0354] uu) a proline (P) at a position corresponding to amino acid position 168 in SEQ ID NO: 1;
[0355] vv) an alanine (A) at a position corresponding to amino acid position 169 in SEQ ID NO: 1;
[0356] ww) a proline (P) at a position corresponding to amino acid position 170 in SEQ ID NO: 1;
[0357] xx) a histidine (H) at a position corresponding to amino acid position 171 in SEQ ID NO: 1;
[0358] yy) a proline (P) at a position corresponding to amino acid position 172 in SEQ ID NO: 1;
[0359] zz) an arginine (R) at a position corresponding to amino acid position 173 in SEQ ID NO: 1;
[0360] aaa) a leucine (L) at a position corresponding to amino acid position 174 in SEQ ID NO: 1;
[0361] bbb) a proline (P) at a position corresponding to amino acid position 175 in SEQ ID NO: 1;
[0362] ccc) a glutamine (Q) at a position corresponding to amino acid position 176 in SEQ ID NO: 1;
[0363] ddd) an alanine (A) at a position corresponding to amino acid position 177 in SEQ ID NO: 1;
[0364] eee) an arginine (R) at a position corresponding to amino acid position 178 in SEQ ID NO: 1;
[0365] fff) a valine (V) at a position corresponding to amino acid position 179 in SEQ ID NO: 1;
[0366] ggg) a glutamine (Q) at a position corresponding to amino acid position 180 in SEQ ID NO: 1;
[0367] hhh) a valine (V) at a position corresponding to amino acid position 182 in SEQ ID NO: 1;
[0368] iii) a proline (P) at a position corresponding to amino acid position 183 in SEQ ID NO: 1;
[0369] jjj) a lysine (K) at a position corresponding to amino acid position 184 in SEQ ID NO: 1;
[0370] kkk) a threonine (T) or a histidine (H) at a position corresponding to amino acid position 185 in SEQ ID NO: 1;
[0371] lll) a serine (S) at a position corresponding to amino acid position 186 in SEQ ID NO: 1;
[0372] mmm) a glutamic acid (E) at a position corresponding to amino acid position 187 in SEQ ID NO: 1;
[0373] nnn) a leucine (L) at a position corresponding to amino acid position 188 in SEQ ID NO: 1;
[0374] ooo) a glutamic acid (E) at a position corresponding to amino acid position 189 in SEQ ID NO: 1;
[0375] ppp) a glutamine (Q) at a position corresponding to amino acid position 190 in SEQ ID NO: 1;
[0376] qqq) a leucine (L) at a position corresponding to amino acid position 191 in SEQ ID NO: 1;
[0377] rrr) a proline (P) at a position corresponding to amino acid position 194 in SEQ ID NO: 1;
[0378] sss) a lysine (K) at a position corresponding to amino acid position 195 in SEQ ID NO: 1;
[0379] ttt) a serine (S) at a position corresponding to amino acid position 196 in SEQ ID NO: 1;
[0380] uuu) a phenylalanine (F) at a position corresponding to amino acid position 197 in SEQ ID NO: 1;
[0381] vvv) an isoleucine (I) at a position corresponding to amino acid position 200 in SEQ ID NO: 1;
[0382] www) a valine (V) at a position corresponding to amino acid position 203 in SEQ ID NO: 1;
[0383] xxx) a leucine (L) at a position corresponding to amino acid position 204 in SEQ ID NO: 1;
[0384] yyy) a cysteine (C) at a position corresponding to amino acid position 209 in SEQ ID NO: 1;
[0385] zzz) a leucine (L) at a position corresponding to amino acid position 222 in SEQ ID NO: 1;
[0386] aaaa) an isoleucine (I) at a position corresponding to amino acid position 232 in SEQ ID NO: 1;
[0387] bbbb) a serine (S) at a position corresponding to amino acid position 236 in SEQ ID NO: 1;
[0388] cccc) a leucine (L) or an arginine (R) at a position corresponding to amino acid position 237 in SEQ ID NO: 1;
[0389] dddd) a histidine (H) at a position corresponding to amino acid position 246 in SEQ ID NO: 1;
[0390] eeee) an isoleucine (I) at a position corresponding to amino acid position 254 in SEQ ID NO: 1;
[0391] ffff) a serine (S) at a position corresponding to amino acid position 258 in SEQ ID NO: 1;
[0392] gggg) an arginine (R) at a position corresponding to amino acid position 267 in SEQ ID NO: 1;
[0393] hhhh) an isoleucine (I) at a position corresponding to amino acid position 278 in SEQ ID NO: 1;
[0394] iiii) a tyrosine (Y) at a position corresponding to amino acid position 281 in SEQ ID NO: 1;
[0395] jjjj) a phenylalanine (F) at a position corresponding to amino acid position 282 in SEQ ID NO: 1;
[0396] kkkk) a threonine (T) at a position corresponding to amino acid position 289 in SEQ ID NO: 1;
[0397] llll) a glycine (G) at a position corresponding to amino acid position 308 in SEQ ID NO: 1;
[0398] mmmm) an arginine (R) at a position corresponding to amino acid position 311 in SEQ ID NO: 1;
[0399] nnnn) an alanine (A) at a position corresponding to amino acid position 312 in SEQ ID NO: 1;
[0400] oooo) an alanine (A) at a position corresponding to amino acid position 316 in SEQ ID NO: 1;
[0401] pppp) an arginine (R) at a position corresponding to amino acid position 318 in SEQ ID NO: 1
[0402] qqqq) an alanine (A) at a position corresponding to amino acid position 334 in SEQ ID NO: 1;
[0403] rrrr) a phenylalanine (F) at a position corresponding to amino acid position 339 in SEQ ID NO: 1;
[0404] ssss) a glycine (G) or a leucine (L) at a position corresponding to amino acid position 340 in SEQ ID NO: 1;
[0405] tttt) a serine (S) at a position corresponding to amino acid position 342 in SEQ ID NO: 1;
[0406] uuuu) an asparagine (N) at a position corresponding to amino acid position 345 in SEQ ID NO: 1;
[0407] vvvv) an asparagine (N) at a position corresponding to amino acid position 346 in SEQ ID NO: 1;
[0408] wwww) an asparagine (N) at a position corresponding to amino acid position 348 in SEQ ID NO: 1; or,
[0409] xxxx) any combination of a) to wwww).
   4. The isolated or recombinant polynucleotide of embodiment 1, wherein said nucleotide sequence encodes a meganuclease polypeptide, wherein said polypeptide further comprises:
[0410] a) an aspartic acid (D) at a position corresponding to amino acid position 2 in SEQ ID NO: 1;
[0411] b) a histidine (H) at a position corresponding to amino acid position 12 in SEQ ID NO: 1;
[0412] c) an isoleucine (I) at a position corresponding to amino acid position 16 in SEQ ID NO: 1;
[0413] d) a serine (S) or an alanine (A) at a position corresponding to amino acid position 19 in SEQ ID NO: 1;
[0414] e) a cysteine (C) at a position corresponding to amino acid position 22 in SEQ ID NO: 1;
[0415] f) a leucine (L) at a position corresponding to amino acid position 23 in SEQ ID NO: 1;
[0416] g) a methionine (M) at a position corresponding to amino acid position 24 in SEQ ID NO: 1;
[0417] h) an arginine (R) or an alanine (A) at a position corresponding to amino acid position 28 in SEQ ID NO: 1;
[0418] i) an arginine (R), alanine (A), glutamine (Q), cysteine (C), glycine (G), serine (S), threonine (T), leucine (L), glutamic acid (E), or a proline (P) at a position corresponding to amino acid position 30 in SEQ ID NO: 1;
[0419] j) an arginine (R) at a position corresponding to amino acid position 31 in SEQ ID NO: 1;
[0420] k) an arginine (R), alanine (A), lysine (K) glutamine (Q), glycine (G) or a leucine (L) at a position corresponding to amino acid position 32 in SEQ ID NO: 1;
[0421] l) an asparagine (N) at a position corresponding to amino acid position 36 in SEQ ID NO: 1;
[0422] m) a leucine (L) at a position corresponding to amino acid position 43 in SEQ ID NO: 1;
[0423] n) an arginine (R) or lysine (K) at a position corresponding to amino acid position 50 in SEQ ID NO: 1;
[0424] o) an isoleucine (I) or a leucine (L) at a position corresponding to amino acid position 54 in SEQ ID NO: 1;
[0425] p) a leucine (L) at a position corresponding to amino acid position 56 in SEQ ID NO: 1;
[0426] q) a glutamic acid (E) at a position corresponding to amino acid position 57 in SEQ ID NO: 1;
[0427] r) an isoleucine (I) at a position corresponding to amino acid position 58 in SEQ ID NO: 1;
[0428] s) a histidine (H) or alanine (A) at a position corresponding to amino acid position 59 in SEQ ID NO: 1;
[0429] t) a valine (V) at a position corresponding to amino acid position 62 in SEQ ID NO: 1;
[0430] u) a lysine (K) at a position corresponding to amino acid position 71 in SEQ ID NO: 1;
[0431] v) a threonine (T) at a position corresponding to amino acid position 72 in SEQ ID NO: 1;
[0432] w) an alanine (A) at a position corresponding to amino acid position 73 in SEQ ID NO: 1;
[0433] x) a glycine (G) at a position corresponding to amino acid position 79 in SEQ ID NO: 1;
[0434] y) an arginine (R) at a position corresponding to amino acid position 80 in SEQ ID NO: 1;
[0435] z) a lysine (K) at a position corresponding to amino acid position 81 in SEQ ID NO: 1;
[0436] aa) an arginine (R) at a position corresponding to amino acid position 82 in SEQ ID NO: 1;
[0437] bb) an aspartic acid (D) at a position corresponding to amino acid position 86 in SEQ ID NO: 1;
[0438] cc) a leucine (L) at a position corresponding to amino acid position 87 in SEQ ID NO: 1;
[0439] dd) an isoleucine (I) at a position corresponding to amino acid position 91 in SEQ ID NO: 1;
[0440] ee) an isoleucine (I) at a position corresponding to amino acid position 95 in SEQ ID NO: 1;
[0441] ff) an arginine (R) at a position corresponding to amino acid position 98 in SEQ ID NO: 1;
[0442] gg) a valine (V) at a position corresponding to amino acid position 103 in SEQ ID NO: 1;
[0443] hh) an alanine (A) at a position corresponding to amino acid position 105 in SEQ ID NO: 1;
[0444] ii) an arginine (R) at a position corresponding to amino acid position 111 in SEQ ID NO: 1;
[0445] jj) a serine (S) at a position corresponding to amino acid position 113 in SEQ ID NO: 1;
[0446] kk) a proline (P) at a position corresponding to amino acid position 114 in SEQ ID NO: 1;
[0447] ll) an arginine (R) at a position corresponding to amino acid position 116 in SEQ ID NO: 1;
[0448] mm) a an glycine (G) at a position corresponding to amino acid position 117 in SEQ ID NO: 1;
[0449] nn) a threonine (T) at a position corresponding to amino acid position 118 in SEQ ID NO: 1;
[0450] oo) a an glycine (G) at a position corresponding to amino acid position 121 in SEQ ID NO: 1;
[0451] pp) an arginine (R) at a position corresponding to amino acid position 124 in SEQ ID NO: 1;
[0452] qq) a cysteine (C) at a position corresponding to amino acid position 128 in SEQ ID NO: 1;
[0453] rr) an alanine (A) at a position corresponding to amino acid position 129 in SEQ ID NO: 1;
[0454] ss) an arginine (R) at a position corresponding to amino acid position 131 in SEQ ID NO: 1;
[0455] tt) a valine (V) at a position corresponding to amino acid position 132 in SEQ ID NO: 1;
[0456] uu) a serine (S) at a position corresponding to amino acid position 147 in SEQ ID NO: 1;
[0457] vv) an alanine (A) at a position corresponding to amino acid position 151 in SEQ ID NO: 1;
[0458] ww) a leucine (L) or a methionine (M) at a position corresponding to amino acid position 153 in SEQ ID NO: 1;
[0459] xx) a tryptophan (W) at a position corresponding to amino acid position 159 in SEQ ID NO: 1;
[0460] yy) a glutamic acid (E) at a position corresponding to amino acid position 160 in SEQ ID NO: 1;
[0461] zz) a valine (V) at a position corresponding to amino acid position 161 in SEQ ID NO: 1;
[0462] aaa) a tyrosine (Y) at a position corresponding to amino acid position 162 in SEQ ID NO: 1; bbb) an arginine (R) at a position corresponding to amino acid position 163 in SEQ ID NO: 1;
[0463] ccc) a histidine (H) at a position corresponding to amino acid position 164 in SEQ ID NO: 1;
[0464] ddd) a leucine (L) at a position corresponding to amino acid position 165 in SEQ ID NO: 1;
[0465] eee) an arginine (R) at a position corresponding to amino acid position 166 in SEQ ID NO: 1;
[0466] fff) a histidine (H) at a position corresponding to amino acid position 167 in SEQ ID NO: 1;
[0467] ggg) a proline (P) at a position corresponding to amino acid position 168 in SEQ ID NO: 1;
[0468] hhh) an alanine (A) at a position corresponding to amino acid position 169 in SEQ ID NO: 1;
[0469] iii) a proline (P) at a position corresponding to amino acid position 170 in SEQ ID NO: 1;
[0470] jjj) a histidine (H) at a position corresponding to amino acid position 171 in SEQ ID NO: 1;
[0471] kkk) a proline (P) at a position corresponding to amino acid position 172 in SEQ ID NO: 1;
[0472] lll) an arginine (R) at a position corresponding to amino acid position 173 in SEQ ID NO: 1;
[0473] mmm) a leucine (L) at a position corresponding to amino acid position 174 in SEQ ID NO: 1;
[0474] nnn) a proline (P) at a position corresponding to amino acid position 175 in SEQ ID NO: 1;
[0475] ooo) a glutamine (Q) at a position corresponding to amino acid position 176 in SEQ ID NO: 1;
[0476] ppp) an alanine (A) at a position corresponding to amino acid position 177 in SEQ ID NO: 1;
[0477] qqq) an arginine (R) at a position corresponding to amino acid position 178 in SEQ ID NO: 1;
[0478] rrr) a valine (V) at a position corresponding to amino acid position 179 in SEQ ID NO: 1;
[0479] sss) a glutamine (Q) at a position corresponding to amino acid position 180 in SEQ ID NO: 1;
[0480] ttt) a valine (V) at a position corresponding to amino acid position 182 in SEQ ID NO: 1;
[0481] uuu) a proline (P) at a position corresponding to amino acid position 183 in SEQ ID NO: 1;
[0482] vvv) a lysine (K) at a position corresponding to amino acid position 184 in SEQ ID NO: 1;
[0483] www) a threonine (T) or a histidine (H) at a position corresponding to amino acid position 185 in SEQ ID NO: 1;
[0484] xxx) a serine (S) at a position corresponding to amino acid position 186 in SEQ ID NO: 1;
[0485] yyy) a glutamic acid (E) at a position corresponding to amino acid position 187 in SEQ ID NO: 1;
[0486] zzz) a leucine (L) at a position corresponding to amino acid position 188 in SEQ ID NO: 1;
[0487] aaaa) a glutamic acid (E) at a position corresponding to amino acid position 189 in SEQ ID NO: 1;
[0488] bbbb) a glutamine (Q) at a position corresponding to amino acid position 190 in SEQ ID NO: 1;
[0489] cccc) a leucine (L) at a position corresponding to amino acid position 191 in SEQ ID NO: 1;
[0490] dddd) an amino acid deletion at a position corresponding to amino acid position 192 in SEQ ID NO: 1;
[0491] eeee) a proline (P) at a position corresponding to amino acid position 194 in SEQ ID NO: 1;
[0492] ffff) a lysine (K) at a position corresponding to amino acid position 195 in SEQ ID NO: 1;
[0493] gggg) a serine (S) at a position corresponding to amino acid position 196 in SEQ ID NO: 1;
[0494] hhhh) a phenylalanine (F) at a position corresponding to amino acid position 197 in SEQ ID NO: 1;
[0495] iiii) an isoleucine (I) at a position corresponding to amino acid position 200 in SEQ ID NO: 1;
[0496] jjjj) a valine (V) at a position corresponding to amino acid position 203 in SEQ ID NO: 1;
[0497] kkkk) a leucine (L) at a position corresponding to amino acid position 204 in SEQ ID NO: 1;
[0498] llll) an alanine (A) or a serine (S) at a position corresponding to amino acid position 206 in SEQ ID NO: 1;
[0499] mmmm) a cysteine (C) at a position corresponding to amino acid position 209 in SEQ ID NO: 1;
[0500] nnnn) a leucine (L) at a position corresponding to amino acid position 222 in SEQ ID NO: 1;
[0501] oooo) a methionine (M) at a position corresponding to amino acid position 211 in SEQ ID NO: 1;
[0502] pppp) an isoleucine (I) at a position corresponding to amino acid position 232 in SEQ ID NO: 1;
[0503] qqqq) a serine (S) at a position corresponding to amino acid position 236 in SEQ ID NO: 1;
[0504] rrrr) a leucine (L) or an arginine (R) at a position corresponding to amino acid position 237 in SEQ ID NO: 1;
[0505] ssss) an isoleucine (I) or a leucine (L) at a position corresponding to amino acid position 241 in SEQ ID NO: 1;
[0506] tttt) a glutamic acid (E) at a position corresponding to amino acid position 244 in SEQ ID NO: 1;
[0507] uuuu) a histidine (H) at a position corresponding to amino acid position 246 in SEQ ID NO: 1;
[0508] vvvv) an aspartic acid (D) or histidine (H) at a position corresponding to amino acid position 253 in SEQ ID NO: 1;
[0509] wwww) an isoleucine (I) at a position corresponding to amino acid position 254 in SEQ ID NO: 1;
[0510] xxxx) a serine (S) at a position corresponding to amino acid position 258 in SEQ ID NO: 1;
[0511] yyyy) an arginine (R) at a position corresponding to amino acid position 267 in SEQ ID NO: 1;
[0512] zzzz) an isoleucine (I) at a position corresponding to amino acid position 278 in SEQ ID NO: 1;
[0513] aaaaa) a tyrosine (Y) at a position corresponding to amino acid position 281 in SEQ ID NO: 1;
[0514] bbbbb) a phenylalanine (F) at a position corresponding to amino acid position 282 in SEQ ID NO: 1;
[0515] ccccc) a threonine (T) at a position corresponding to amino acid position 289 in SEQ ID NO: 1;
[0516] ddddd) an alanine (A) at a position corresponding to amino acid position 292 in SEQ ID NO: 1;
[0517] eeeee) a glycine (G) at a position corresponding to amino acid position 308 in SEQ ID NO: 1;
[0518] fffff) an arginine (R) at a position corresponding to amino acid position 311 in SEQ ID NO: 1;
[0519] ggggg) an alanine (A) at a position corresponding to amino acid position 312 in SEQ ID NO: 1;
[0520] hhhhh) an alanine (A) at a position corresponding to amino acid position 316 in SEQ ID NO: 1;
[0521] iiiii) an arginine (R) at a position corresponding to amino acid position 318 in SEQ ID NO: 1
[0522] jjjjj) a valine (V) at a position corresponding to amino acid position 319 in SEQ ID NO: 1;
[0523] kkkkk) an alanine (A) at a position corresponding to amino acid position 334 in SEQ ID NO: 1;
[0524] lllll) a phenylalanine (F) at a position corresponding to amino acid position 339 in SEQ ID NO: 1;
[0525] mmmmm) a glycine (G) or a leucine (L) at a position corresponding to amino acid position 340 in SEQ ID NO: 1;
[0526] nnnnn) a serine (S) at a position corresponding to amino acid position 342 in SEQ ID NO: 1;
[0527] ooooo) an asparagine (N) at a position corresponding to amino acid position 345 in SEQ ID NO: 1;
[0528] ppppp) an asparagine (N) at a position corresponding to amino acid position 346 in SEQ ID NO: 1; or,
[0529] qqqqq) an asparagine (N) at a position corresponding to amino acid position 348 in SEQ ID NO: 1; or,
[0530] rrrrr) any combination of a) to qqqqq).
   5. The isolated or recombinant polynucleotide of embodiment 1, wherein said nucleotide sequence encodes a meganuclease polypeptide selected from the group consisting of SEQ ID NOs: 14, 15, 16, 17, 18, 19, 20, 21, 22, 23, 24, 25, 26, 27, 28, 29, 30, 31, 32, 33, 34, 35, 36, 37, 38, 87, 88, 89, 90, 91, 92, 93, 94, 95, 96, 97, 98, 99, 100, 101, 102, 103, 104, 105, 106, 107, 108, 109, 110, 111, 112, 113, 114, 115, 116, 117, 118, 119, 120, 121, 122, 123, 124, 125, 126, 127, 128, 129, 130, 131, 132, 133, 134, 135, 136, 137, 138, 139, 140, 141, 142, 143, 144, 145, 146, 147, 148, 149, 150, 151, 152, 153, 154, 155, 156, 157, 158, 159, 160, 161, 162, 163, 164, 165, 166, 167, 251, 252, 253, 272, 273, 274, 275, 272, 273, 274, 275, 284, 285, 286, 287, 288, 289, 290, 291, 292, 293, 294, 295, 296, 297, 298, 330, 331, 332, 333, 334, 335, 336, 337, 338, 339, 340, 341, 357, 358, 359, 360, 361, 362, 363, 364, 365, 366, 367, 368, 369, 370, 371, 390, 391, 392, 393, 394, 395, 396, 397, 398, 399, 400, 401, 402, 403, 430, 431, 432 and 433.
   6. The isolated or recombinant polynucleotide of embodiment 1, wherein said nucleotide sequence encodes a meganuclease polypeptide, wherein the polypeptide is capable of recognizing and cleaving a meganuclease recognition sequence selected from the group consisting of SEQ ID NO: 2 (LIG3-4), SEQ ID NO: 85 (MHP77), SEQ ID NO:269 (MS26), SEQ ID NO:281 (MHP14), SEQ ID NO: 331(MP107), SEQ ID NO:358 (ZM6.3), SEQ ID NO:390 (ZM6.22v2), SEQ ID NO:423 or SEQ ID NO:424.
   7. The isolated or recombinant polynucleotide of embodiment 1, wherein said nucleotide sequence encodes a meganuclease polypeptide, wherein said polypeptide has an increased meganuclease activity when compared to a control meganuclease that lacks said amino acid modification.
   8. The isolated or recombinant polynucleotide of embodiment 7, wherein said control meganuclease is selected from the group of SEQ ID NO:1 (LIG3-4), SEQ ID NO: 86 (MHP77), SEQ ID NO: 250 (MHP77.3), SEQ ID NO:270 (MS26+), SEQ ID NO:271, SEQ ID NO:282 (MHP14), SEQ ID NO:283 (MHP14+), SEQ ID NO: 329 (MP107), SEQ ID NO:356 (ZM6.3), SEQ ID NO:389 (ZM6.22v2), SEQ ID NO:429 or SEQ ID NO:435.
   9. The isolated or recombinant polynucleotide of embodiment 7, wherein the increased meganuclease activity is evidenced by:
[0531] a) a higher yeast assay score when compared to the control meganuclease that lacks said amino acid modification; or,
[0532] b) a higher target site mutation rate when compared to the control meganuclease that lacks said amino acid modification; or,
[0533] c) a higher in-vitro cutting when compared to the control meganuclease that lacks said amino acid modification; or,
[0534] d) any combination of (a), (b) and (c).
   10. The isolated or recombinant polynucleotide of embodiment 1, further comprising a nucleotide sequence encoding a N-terminal nuclear transit peptide.
   11. The isolated or recombinant polynucleotide of embodiment 1, further comprising a nucleotide sequence encoding a C-terminal histidine tag.
   12. The isolated or recombinant polynucleotide of embodiment 7, wherein the increased meganuclease activity is determined at 16° C., 24° C., 28° C., 30° C. or 37° C.
   13. A recombinant DNA construct, comprising the isolated or recombinant polynucleotide of embodiment 1.
   14. The recombinant DNA construct of embodiment 13, further comprising a promoter operably linked to said polynucleotide.
   15. The recombinant DNA construct of embodiment 14, wherein said promoter is heterologous with respect to said polynucleotide or said promoter is homologous with respect to said polynucleotide.
   16. A cell comprising at least one polynucleotide of embodiment 1 or the recombinant DNA construct of embodiment 13, wherein said polynucleotide is heterologous to the cell.
   17. The cell of embodiment 16, wherein said cell is a yeast cell.
   18. The cell of embodiment 16, wherein said cell is a plant cell.
   19. The cell of embodiment 16, wherein said polynucleotide or said recombinant DNA construct is stably incorporated into the genome of said plant cell.
   20. The cell of embodiment 16, wherein said polynucleotide or said recombinant DNA construct is stably incorporated into the chloroplast genome of said plant cell.
   21. The cell of embodiment 18, wherein said plant cell is from a monocot.
   22. The cell of embodiment 21 wherein said monocot is maize, wheat, rice, barley, sugarcane, sorghum, or rye.
   23. The cell of embodiment 18, wherein said plant cell is from a dicot.
   24. The cell of embodiment 23, wherein the dicot is soybean, Brassica, sunflower, cotton, or alfalfa.
   25. A plant comprising a plant cell of embodiment 18.
   26. A plant explant comprising a plant cell of embodiment 18.
   27. The plant, the explant or the plant cell of embodiment 26, wherein said plant, explant or plant cell exhibits an increased meganuclease activity when compared to a plant, explant or plant cell of the same species, strain or cultivar that does not comprise at least one polynucleotide of embodiments 1.
   28. A transgenic seed produced by the plant of embodiment 25.
   29. An isolated polypeptide having meganuclease activity, said polypeptide comprising:
[0535] a) an amino acid sequence having at least one amino acid modification at an amino acid position corresponding to a position of SEQ ID NO:1 selected from the group consisting of positions 2, 12, 16, 22, 23, 31, 36, 43, 50, 56, 58, 59, 62, 71, 72, 73, 80, 81, 82, 86, 91, 95, 98, 103, 113, 114, 116, 117, 118, 121, 124, 128, 129, 131, 147, 151, 153, 159, 160, 161, 162, 163, 164, 165, 166, 167, 168, 169, 170, 171, 172, 173, 174, 175, 176, 177, 178, 179, 180, 182, 183, 184, 185, 186, 187, 188, 189, 190, 191, 192, 194, 195, 196, 197, 200, 203, 204, 209, 222, 232, 236, 237, 246, 254, 258, 267, 278, 281, 282, 289, 308, 311, 312, 316, 318, 319, 334, 339, 340, 342, 345, 346, 348 and combinations thereof; or,
[0536] b) an amino acid sequence having at least 1, 2, 3, 4, 5, 6, 7, 8, 9, 10, 11, 12, 13, 14, 15, 16, 17, 18, 19, 20, 21, 22, 23, 24, 25, 26, 27, 28, 29, 30, 31, 32, 33, 34, 35, 36, 37, 38, 39, 40, 41, 42, 43 or 44 of any of the amino acid modification of (a);
   30. The isolated polypeptide of embodiment 29, wherein said polypeptide has at least 80% sequence identity to SEQ ID NO: 1.
   31. The isolated polypeptide of embodiment 29, wherein said at least one amino acid modification comprises:
[0537] a) an aspartic acid (D) at a position corresponding to amino acid position 2 in SEQ ID NO: 1;
[0538] b) a histidine (H) at a position corresponding to amino acid position 12 in SEQ ID NO: 1;
[0539] c) an isoleucine (I) at a position corresponding to amino acid position 16 in SEQ ID NO: 1;
[0540] d) a cysteine (C) at a position corresponding to amino acid position 22 in SEQ ID NO: 1;
[0541] e) a leucine (L) at a position corresponding to amino acid position 23 in SEQ ID NO: 1;
[0542] f) an arginine (R) at a position corresponding to amino acid position 31 in SEQ ID NO: 1;
[0543] g) an asparagine (N) at a position corresponding to amino acid position 36 in SEQ ID NO: 1;
[0544] h) a leucine (L) at a position corresponding to amino acid position 43 in SEQ ID NO: 1;
[0545] i) an arginine (R) or lysine (K) at a position corresponding to amino acid position 50 in SEQ ID NO: 1;
[0546] j) a leucine (L) at a position corresponding to amino acid position 56 in SEQ ID NO: 1;
[0547] k) an isoleucine (I) at a position corresponding to amino acid position 58 in SEQ ID NO: 1;
[0548] l) a histidine (H) or alanine (A) at a position corresponding to amino acid position 59 in SEQ ID NO: 1;
[0549] m) a valine (V) at a position corresponding to amino acid position 62 in SEQ ID NO: 1;
[0550] n) a lysine (K) at a position corresponding to amino acid position 71 in SEQ ID NO: 1;
[0551] o) a threonine (T) at a position corresponding to amino acid position 72 in SEQ ID NO: 1;
[0552] p) an alanine (A) at a position corresponding to amino acid position 73 in SEQ ID NO: 1;
[0553] q) an arginine (R) at a position corresponding to amino acid position 80 in SEQ ID NO: 1;
[0554] r) a lysine (K) at a position corresponding to amino acid position 81 in SEQ ID NO: 1;
[0555] s) an arginine (R) at a position corresponding to amino acid position 82 in SEQ ID NO: 1;
[0556] t) an aspartic acid (D) at a position corresponding to amino acid position 86 in SEQ ID NO: 1;
[0557] u) an isoleucine (I) at a position corresponding to amino acid position 91 in SEQ ID NO: 1;
[0558] v) an isoleucine (I) at a position corresponding to amino acid position 95 in SEQ ID NO: 1;
[0559] w) an arginine (R) at a position corresponding to amino acid position 98 in SEQ ID NO: 1;
[0560] x) a valine (V) at a position corresponding to amino acid position 103 in SEQ ID NO: 1;
[0561] y) a serine (S) at a position corresponding to amino acid position 113 in SEQ ID NO: 1;
[0562] z) a proline (P) at a position corresponding to amino acid position 114 in SEQ ID NO: 1;
[0563] aa) an arginine (R) at a position corresponding to amino acid position 116 in SEQ ID NO: 1;
[0564] bb) a glycine (G) at a position corresponding to amino acid position 117 in SEQ ID NO: 1;
[0565] cc) a threonine (T) at a position corresponding to amino acid position 118 in SEQ ID NO: 1;
[0566] dd) a an glycine (G) at a position corresponding to amino acid position 121 in SEQ ID NO: 1;
[0567] ee) an arginine (R) at a position corresponding to amino acid position 124 in SEQ ID NO: 1;
[0568] ff) a cysteine (C) at a position corresponding to amino acid position 128 in SEQ ID NO: 1;
[0569] gg) an alanine (A) at a position corresponding to amino acid position 129 in SEQ ID NO: 1;
[0570] hh) an arginine (R) at a position corresponding to amino acid position 131 in SEQ ID NO: 1;
[0571] ii) a serine (S) at a position corresponding to amino acid position 147 in SEQ ID NO: 1;
[0572] jj) an alanine (A) at a position corresponding to amino acid position 151 in SEQ ID NO: 1;
[0573] kk) a leucine (L) or a methionine (M) at a position corresponding to amino acid position 153 in SEQ ID NO: 1;
[0574] ll) a tryptophan (W) at a position corresponding to amino acid position 159 in SEQ ID NO: 1;
[0575] mm) a glutamic acid (E) at a position corresponding to amino acid position 160 in SEQ ID NO: 1;
[0576] nn) a valine (V) at a position corresponding to amino acid position 161 in SEQ ID NO: 1;
[0577] oo) a tyrosine (Y) at a position corresponding to amino acid position 162 in SEQ ID NO: 1;
[0578] pp) an arginine (R) at a position corresponding to amino acid position 163 in SEQ ID NO: 1;
[0579] qq) a histidine (H) at a position corresponding to amino acid position 164 in SEQ ID NO: 1;
[0580] rr) a leucine (L) at a position corresponding to amino acid position 165 in SEQ ID NO: 1;
[0581] ss) an arginine (R) at a position corresponding to amino acid position 166 in SEQ ID NO: 1;
[0582] tt) a histidine (H) at a position corresponding to amino acid position 167 in SEQ ID NO: 1;
[0583] uu) a proline (P) at a position corresponding to amino acid position 168 in SEQ ID NO: 1;
[0584] vv) an alanine (A) at a position corresponding to amino acid position 169 in SEQ ID NO: 1;
[0585] ww) a proline (P) at a position corresponding to amino acid position 170 in SEQ ID NO: 1;
[0586] xx) a histidine (H) at a position corresponding to amino acid position 171 in SEQ ID NO: 1;
[0587] yy) a proline (P) at a position corresponding to amino acid position 172 in SEQ ID NO: 1;
[0588] zz) an arginine (R) at a position corresponding to amino acid position 173 in SEQ ID NO: 1;
[0589] aaa) a leucine (L) at a position corresponding to amino acid position 174 in SEQ ID NO: 1;
[0590] bbb) a proline (P) at a position corresponding to amino acid position 175 in SEQ ID NO: 1;
[0591] ccc) a glutamine (Q) at a position corresponding to amino acid position 176 in SEQ ID NO: 1;
[0592] ddd) an alanine (A) at a position corresponding to amino acid position 177 in SEQ ID NO: 1;
[0593] eee) an arginine (R) at a position corresponding to amino acid position 178 in SEQ ID NO: 1;
[0594] fff) a valine (V) at a position corresponding to amino acid position 179 in SEQ ID NO: 1;
[0595] ggg) a glutamine (Q) at a position corresponding to amino acid position 180 in SEQ ID NO: 1;
[0596] hhh) a valine (V) at a position corresponding to amino acid position 182 in SEQ ID NO: 1;
[0597] iii) a proline (P) at a position corresponding to amino acid position 183 in SEQ ID NO: 1;
[0598] jjj) a lysine (K) at a position corresponding to amino acid position 184 in SEQ ID NO: 1;
[0599] kkk) a threonine (T) or a histidine (H) at a position corresponding to amino acid position 185 in SEQ ID NO: 1;
[0600] lll) a serine (S) at a position corresponding to amino acid position 186 in SEQ ID NO: 1; mmm) a glutamic acid (E) at a position corresponding to amino acid position 187 in SEQ ID NO: 1;
[0601] nnn) a leucine (L) at a position corresponding to amino acid position 188 in SEQ ID NO: 1;
[0602] ooo) a glutamic acid (E) at a position corresponding to amino acid position 189 in SEQ ID NO: 1;
[0603] ppp) a glutamine (Q) at a position corresponding to amino acid position 190 in SEQ ID NO: 1;
[0604] qqq) a leucine (L) at a position corresponding to amino acid position 191 in SEQ ID NO: 1;
[0605] rrr) a proline (P) at a position corresponding to amino acid position 194 in SEQ ID NO: 1;
[0606] sss) a lysine (K) at a position corresponding to amino acid position 195 in SEQ ID NO: 1;
[0607] ttt) a serine (S) at a position corresponding to amino acid position 196 in SEQ ID NO: 1;
[0608] uuu) a phenylalanine (F) at a position corresponding to amino acid position 197 in SEQ ID NO: 1;
[0609] vvv) an isoleucine (I) at a position corresponding to amino acid position 200 in SEQ ID NO: 1;
[0610] www) a valine (V) at a position corresponding to amino acid position 203 in SEQ ID NO: 1;
[0611] xxx) a leucine (L) at a position corresponding to amino acid position 204 in SEQ ID NO: 1;
[0612] yyy) a cysteine (C) at a position corresponding to amino acid position 209 in SEQ ID NO: 1;
[0613] zzz) a leucine (L) at a position corresponding to amino acid position 222 in SEQ ID NO: 1;
[0614] aaaa) an isoleucine (I) at a position corresponding to amino acid position 232 in SEQ ID NO: 1;
[0615] bbbb) a serine (S) at a position corresponding to amino acid position 236 in SEQ ID NO: 1;
[0616] cccc) a leucine (L) or an arginine (R) at a position corresponding to amino acid position 237 in SEQ ID NO: 1;
[0617] dddd) a histidine (H) at a position corresponding to amino acid position 246 in SEQ ID NO: 1;
[0618] eeee) an isoleucine (I) at a position corresponding to amino acid position 254 in SEQ ID NO: 1;
[0619] ffff) a serine (S) at a position corresponding to amino acid position 258 in SEQ ID NO: 1;
[0620] gggg) an arginine (R) at a position corresponding to amino acid position 267 in SEQ ID NO: 1;
[0621] hhhh) an isoleucine (I) at a position corresponding to amino acid position 278 in SEQ ID NO: 1;
[0622] iiii) a tyrosine (Y) at a position corresponding to amino acid position 281 in SEQ ID NO: 1;
[0623] jjjj) a phenylalanine (F) at a position corresponding to amino acid position 282 in SEQ ID NO: 1;
[0624] kkkk) a threonine (T) at a position corresponding to amino acid position 289 in SEQ ID NO: 1;
[0625] llll) a glycine (G) at a position corresponding to amino acid position 308 in SEQ ID NO: 1;
[0626] mmmm) an arginine (R) at a position corresponding to amino acid position 311 in SEQ ID NO: 1;
[0627] nnnn) an alanine (A) at a position corresponding to amino acid position 312 in SEQ ID NO: 1;
[0628] oooo) an alanine (A) at a position corresponding to amino acid position 316 in SEQ ID NO: 1;
[0629] pppp) an arginine (R) at a position corresponding to amino acid position 318 in SEQ ID NO: 1
[0630] qqqq) an alanine (A) at a position corresponding to amino acid position 334 in SEQ ID NO: 1;
[0631] rrrr) a phenylalanine (F) at a position corresponding to amino acid position 339 in SEQ ID NO: 1;
[0632] ssss) a glycine (G) or a leucine (L) at a position corresponding to amino acid position 340 in SEQ ID NO: 1;
[0633] tttt) a serine (S) at a position corresponding to amino acid position 342 in SEQ ID NO: 1;
[0634] uuuu) an asparagine (N) at a position corresponding to amino acid position 345 in SEQ ID NO: 1;
[0635] vvvv) an asparagine (N) at a position corresponding to amino acid position 346 in SEQ ID NO: 1;
[0636] wwww) an asparagine (N) at a position corresponding to amino acid position 348 in SEQ ID NO: 1; or,
[0637] xxxx) any combination of a) to wwww).
   32. The isolated polypeptide of embodiment 29, wherein said polypeptide further comprises:
[0638] a) an aspartic acid (D) at a position corresponding to amino acid position 2 in SEQ ID NO: 1;
[0639] b) a histidine (H) at a position corresponding to amino acid position 12 in SEQ ID NO: 1;
[0640] c) an isoleucine (I) at a position corresponding to amino acid position 16 in SEQ ID NO: 1;
[0641] d) a serine (S) or an alanine (A) at a position corresponding to amino acid position 19 in SEQ ID NO: 1;
[0642] e) a cysteine (C) at a position corresponding to amino acid position 22 in SEQ ID NO: 1;
[0643] f) a leucine (L) at a position corresponding to amino acid position 23 in SEQ ID NO: 1;
[0644] g) a methionine (M) at a position corresponding to amino acid position 24 in SEQ ID NO: 1;
[0645] h) an arginine (R) or an alanine (A) at a position corresponding to amino acid position 28 in SEQ ID NO: 1;
[0646] i) an arginine (R), alanine (A), glutamine (Q), cysteine (C), glycine (G), serine (S), threonine (T), leucine (L), glutamic acid (E), or a proline (P) at a position corresponding to amino acid position 30 in SEQ ID NO: 1;
[0647] j) an arginine (R) at a position corresponding to amino acid position 31 in SEQ ID NO: 1;
[0648] k) an arginine (R), alanine (A), lysine (K) glutamine (Q), glycine (G) or a leucine (L) at a position corresponding to amino acid position 32 in SEQ ID NO: 1;
[0649] l) an asparagine (N) at a position corresponding to amino acid position 36 in SEQ ID NO: 1;
[0650] m) a leucine (L) at a position corresponding to amino acid position 43 in SEQ ID NO: 1;
[0651] n) an arginine (R) or lysine (K) at a position corresponding to amino acid position 50 in SEQ ID NO: 1;
[0652] o) an isoleucine (I) or a leucine (L) at a position corresponding to amino acid position 54 in SEQ ID NO: 1;
[0653] p) a leucine (L) at a position corresponding to amino acid position 56 in SEQ ID NO: 1;
[0654] q) a glutamic acid (E) at a position corresponding to amino acid position 57 in SEQ ID NO: 1;
[0655] r) an isoleucine (I) at a position corresponding to amino acid position 58 in SEQ ID NO: 1;
[0656] s) a histidine (H) or alanine (A) at a position corresponding to amino acid position 59 in SEQ ID NO: 1;
[0657] t) a valine (V) at a position corresponding to amino acid position 62 in SEQ ID NO: 1;
[0658] u) a lysine (K) at a position corresponding to amino acid position 71 in SEQ ID NO: 1;
[0659] v) a threonine (T) at a position corresponding to amino acid position 72 in SEQ ID NO: 1;
[0660] w) an alanine (A) at a position corresponding to amino acid position 73 in SEQ ID NO: 1;
[0661] x) a glycine (G) at a position corresponding to amino acid position 79 in SEQ ID NO: 1;
[0662] y) an arginine (R) at a position corresponding to amino acid position 80 in SEQ ID NO: 1;
[0663] z) a lysine (K) at a position corresponding to amino acid position 81 in SEQ ID NO: 1;
[0664] aa) an arginine (R) at a position corresponding to amino acid position 82 in SEQ ID NO: 1;
[0665] bb) an aspartic acid (D) at a position corresponding to amino acid position 86 in SEQ ID NO: 1;
[0666] cc) a leucine (L) at a position corresponding to amino acid position 87 in SEQ ID NO: 1;
[0667] dd) an isoleucine (I) at a position corresponding to amino acid position 91 in SEQ ID NO: 1;
[0668] ee) an isoleucine (I) at a position corresponding to amino acid position 95 in SEQ ID NO: 1;
[0669] ff) an arginine (R) at a position corresponding to amino acid position 98 in SEQ ID NO: 1;
[0670] gg) a valine (V) at a position corresponding to amino acid position 103 in SEQ ID NO: 1;
[0671] hh) an alanine (A) at a position corresponding to amino acid position 105 in SEQ ID NO: 1;
[0672] ii) an arginine (R) at a position corresponding to amino acid position 111 in SEQ ID NO: 1;
[0673] jj) a serine (S) at a position corresponding to amino acid position 113 in SEQ ID NO: 1;
[0674] kk) a proline (P) at a position corresponding to amino acid position 114 in SEQ ID NO: 1;
[0675] ll) an arginine (R) at a position corresponding to amino acid position 116 in SEQ ID NO: 1;
[0676] mm) a an glycine (G) at a position corresponding to amino acid position 117 in SEQ ID NO: 1;
[0677] nn) a threonine (T) at a position corresponding to amino acid position 118 in SEQ ID NO: 1;
[0678] oo) a an glycine (G) at a position corresponding to amino acid position 121 in SEQ ID NO: 1;
[0679] pp) an arginine (R) at a position corresponding to amino acid position 124 in SEQ ID NO: 1;
[0680] qq) a cysteine (C) at a position corresponding to amino acid position 128 in SEQ ID NO: 1;
[0681] rr) an alanine (A) at a position corresponding to amino acid position 129 in SEQ ID NO: 1;
[0682] ss) an arginine (R) at a position corresponding to amino acid position 131 in SEQ ID NO: 1;
[0683] tt) a valine (V) at a position corresponding to amino acid position 132 in SEQ ID NO: 1;
[0684] uu) a serine (S) at a position corresponding to amino acid position 147 in SEQ ID NO: 1;
[0685] vv) an alanine (A) at a position corresponding to amino acid position 151 in SEQ ID NO: 1;
[0686] ww) a leucine (L) or a methionine (M) at a position corresponding to amino acid position 153 in SEQ ID NO: 1;
[0687] xx) a tryptophan (W) at a position corresponding to amino acid position 159 in SEQ ID NO: 1;
[0688] yy) a glutamic acid (E) at a position corresponding to amino acid position 160 in SEQ ID NO: 1;
[0689] zz) a valine (V) at a position corresponding to amino acid position 161 in SEQ ID NO: 1;
[0690] aaa) a tyrosine (Y) at a position corresponding to amino acid position 162 in SEQ ID NO: 1;
[0691] bbb) an arginine (R) at a position corresponding to amino acid position 163 in SEQ ID NO: 1;
[0692] ccc) a histidine (H) at a position corresponding to amino acid position 164 in SEQ ID NO: 1;
[0693] ddd) a leucine (L) at a position corresponding to amino acid position 165 in SEQ ID NO: 1;
[0694] eee) an arginine (R) at a position corresponding to amino acid position 166 in SEQ ID NO: 1;
[0695] fff) a histidine (H) at a position corresponding to amino acid position 167 in SEQ ID NO: 1;
[0696] ggg) a proline (P) at a position corresponding to amino acid position 168 in SEQ ID NO: 1;
[0697] hhh) an alanine (A) at a position corresponding to amino acid position 169 in SEQ ID NO: 1;
[0698] iii) a proline (P) at a position corresponding to amino acid position 170 in SEQ ID NO: 1;
[0699] jjj) a histidine (H) at a position corresponding to amino acid position 171 in SEQ ID NO: 1;
[0700] kkk) a proline (P) at a position corresponding to amino acid position 172 in SEQ ID NO: 1;
[0701] lll) an arginine (R) at a position corresponding to amino acid position 173 in SEQ ID NO: 1;
[0702] mmm) a leucine (L) at a position corresponding to amino acid position 174 in SEQ ID NO: 1;
[0703] nnn) a proline (P) at a position corresponding to amino acid position 175 in SEQ ID NO: 1;
[0704] ooo) a glutamine (Q) at a position corresponding to amino acid position 176 in SEQ ID NO: 1;
[0705] ppp) an alanine (A) at a position corresponding to amino acid position 177 in SEQ ID NO: 1;
[0706] qqq) an arginine (R) at a position corresponding to amino acid position 178 in SEQ ID NO: 1;
[0707] rrr) a valine (V) at a position corresponding to amino acid position 179 in SEQ ID NO: 1;
[0708] sss) a glutamine (Q) at a position corresponding to amino acid position 180 in SEQ ID NO: 1;
[0709] ttt) a valine (V) at a position corresponding to amino acid position 182 in SEQ ID NO: 1;
[0710] uuu) a proline (P) at a position corresponding to amino acid position 183 in SEQ ID NO: 1;
[0711] vvv) a lysine (K) at a position corresponding to amino acid position 184 in SEQ ID NO: 1;
[0712] www) a threonine (T) or a histidine (H) at a position corresponding to amino acid position 185 in SEQ ID NO: 1;
[0713] xxx) a serine (S) at a position corresponding to amino acid position 186 in SEQ ID NO: 1;
[0714] yyy) a glutamic acid (E) at a position corresponding to amino acid position 187 in SEQ ID NO: 1;
[0715] zzz) a leucine (L) at a position corresponding to amino acid position 188 in SEQ ID NO: 1;
[0716] aaaa) a glutamic acid (E) at a position corresponding to amino acid position 189 in SEQ ID NO: 1;
[0717] bbbb) a glutamine (Q) at a position corresponding to amino acid position 190 in SEQ ID NO: 1;
[0718] cccc) a leucine (L) at a position corresponding to amino acid position 191 in SEQ ID NO: 1;
[0719] dddd) an amino acid deletion at a position corresponding to amino acid position 192 in SEQ ID NO: 1;
[0720] eeee) a proline (P) at a position corresponding to amino acid position 194 in SEQ ID NO: 1;
[0721] ffff) a lysine (K) at a position corresponding to amino acid position 195 in SEQ ID NO: 1;
[0722] gggg) a serine (S) at a position corresponding to amino acid position 196 in SEQ ID NO: 1;
[0723] hhhh) a phenylalanine (F) at a position corresponding to amino acid position 197 in SEQ ID NO: 1;
[0724] iiii) an isoleucine (I) at a position corresponding to amino acid position 200 in SEQ ID NO: 1;
[0725] jjjj) a valine (V) at a position corresponding to amino acid position 203 in SEQ ID NO: 1;
[0726] kkkk) a leucine (L) at a position corresponding to amino acid position 204 in SEQ ID NO: 1;
[0727] llll) an alanine (A) or a serine (S) at a position corresponding to amino acid position 206 in SEQ ID NO: 1;
[0728] mmmm) a cysteine (C) at a position corresponding to amino acid position 209 in SEQ ID NO: 1;
[0729] nnnn) a leucine (L) at a position corresponding to amino acid position 222 in SEQ ID NO: 1;
[0730] oooo) a methionine (M) at a position corresponding to amino acid position 211 in SEQ ID NO: 1;
[0731] pppp) an isoleucine (I) at a position corresponding to amino acid position 232 in SEQ ID NO: 1;
[0732] qqqq) a serine (S) at a position corresponding to amino acid position 236 in SEQ ID NO: 1;
[0733] rrrr) a leucine (L) or an arginine (R) at a position corresponding to amino acid position 237 in SEQ ID NO: 1;
[0734] ssss) an isoleucine (I) or a leucine (L) at a position corresponding to amino acid position 241 in SEQ ID NO: 1;
[0735] tttt) a glutamic acid (E) at a position corresponding to amino acid position 244 in SEQ ID NO: 1;
[0736] uuuu) a histidine (H) at a position corresponding to amino acid position 246 in SEQ ID NO: 1;
[0737] vvvv) an aspartic acid (D) or histidine (H) at a position corresponding to amino acid position 253 in SEQ ID NO: 1;
[0738] wwww) an isoleucine (I) at a position corresponding to amino acid position 254 in SEQ ID NO: 1;
[0739] xxxx) a serine (S) at a position corresponding to amino acid position 258 in SEQ ID NO: 1;
[0740] yyyy) an arginine (R) at a position corresponding to amino acid position 267 in SEQ ID NO: 1;
[0741] zzzz) an isoleucine (I) at a position corresponding to amino acid position 278 in SEQ ID NO: 1;
[0742] aaaaa) a tyrosine (Y) at a position corresponding to amino acid position 281 in SEQ ID NO: 1;
[0743] bbbbb) a phenylalanine (F) at a position corresponding to amino acid position 282 in SEQ ID NO: 1;
[0744] ccccc) a threonine (T) at a position corresponding to amino acid position 289 in SEQ ID NO: 1;
[0745] ddddd) an alanine (A) at a position corresponding to amino acid position 292 in SEQ ID NO: 1;
[0746] eeeee) a glycine (G) at a position corresponding to amino acid position 308 in SEQ ID NO: 1;
[0747] fffff) an arginine (R) at a position corresponding to amino acid position 311 in SEQ ID NO: 1;
[0748] ggggg) an alanine (A) at a position corresponding to amino acid position 312 in SEQ ID NO: 1;
[0749] hhhhh) an alanine (A) at a position corresponding to amino acid position 316 in SEQ ID NO: 1;
[0750] iiiii) an arginine (R) at a position corresponding to amino acid position 318 in SEQ ID NO: 1
[0751] jjjjj) a valine (V) at a position corresponding to amino acid position 319 in SEQ ID NO: 1;
[0752] kkkkk) an alanine (A) at a position corresponding to amino acid position 334 in SEQ ID NO: 1;
[0753] lllll) a phenylalanine (F) at a position corresponding to amino acid position 339 in SEQ ID NO: 1;
[0754] mmmmm) a glycine (G) or a leucine (L) at a position corresponding to amino acid position 340 in SEQ ID NO: 1;
[0755] nnnnn) a serine (S) at a position corresponding to amino acid position 342 in SEQ ID NO: 1;
[0756] ooooo) an asparagine (N) at a position corresponding to amino acid position 345 in SEQ ID NO: 1;
[0757] ppppp) an asparagine (N) at a position corresponding to amino acid position 346 in SEQ ID NO: 1; or,
[0758] qqqqq) an asparagine (N) at a position corresponding to amino acid position 348 in SEQ ID NO: 1; or,
[0759] rrrrr) any combination of a) to qqqqq).
   33. The isolated polypeptide of embodiment 29 selected from the group consisting of SEQ ID NOs: 14, 15, 16, 17, 18, 19, 20, 21, 22, 23, 24, 25, 26, 27, 28, 29, 30, 31, 32, 33, 34, 35, 36, 37, 38, 87, 88, 89, 90, 91, 92, 93, 94, 95, 96, 97, 98, 99, 100, 101, 102, 103, 104, 105, 106, 107, 108, 109, 110, 111, 112, 113, 114, 115, 116, 117, 118, 119, 120, 121, 122, 123, 124, 125, 126, 127, 128, 129, 130, 131, 132, 133, 134, 135, 136, 137, 138, 139, 140, 141, 142, 143, 144, 145, 146, 147, 148, 149, 150, 151, 152, 153, 154, 155, 156, 157, 158, 159, 160, 161, 162, 163, 164, 165, 166, 167, 251, 252, 253, 272, 273, 274, 275, 272, 273, 274, 275, 284, 285, 286, 287, 288, 289, 290, 291, 292, 293, 294, 295, 296, 297, 298, 330, 331, 332, 333, 334, 335, 336, 337, 338, 339, 340, 341, 357, 358, 359, 360, 361, 362, 363, 364, 365, 366, 367, 368, 369, 370, 371, 390, 391, 392, 393, 394, 395, 396, 397, 398, 399, 400, 401, 402, 430, 431, 432 and 433.
   34. The isolated polypeptide of embodiment 29, wherein the polypeptide is capable of recognizing and cleaving a meganuclease recognition sites selected from the group consisting of SEQ ID NO: 2 (LIG3-4), SEQ ID NO: 85 (MHP77), SEQ ID NO:269 (MS26), SEQ ID NO:281 (MHP14), SEQ ID NO: 331(MP107), SEQ ID NO:358 (ZM6.3), SEQ ID NO:390 (ZM6.22v2), SEQ ID NO:423 or SEQ ID NO:424.
   35. The isolated polypeptide of embodiment 29, wherein said polypeptide has an increased meganuclease activity when compared to a control meganuclease that lacks said amino acid modification.
   36. The isolated polypeptide of embodiment 29, wherein said control meganuclease is selected from the group of SEQ ID NO:1 (LIG3-4), SEQ ID NO: 86 (MHP77), SEQ ID NO: 250 (MHP77.3), SEQ ID NO:270 (MS26+), SEQ ID NO:271, SEQ ID NO:282 (MHP14), SEQ ID NO:283 (MHP14+), SEQ ID NO: 329 (MP107), SEQ ID NO:356 (ZM6.3), SEQ ID NO:389 (ZM6.22v2), SEQ ID NO:429 or SEQ ID NO:435.
   37. The isolated polypeptide of embodiment 29, wherein the increased meganuclease activity is evidenced by:
[0760] a) a higher yeast assay score when compared to the control meganuclease that lacks said amino acid modification; or,
[0761] b) a higher target site mutation rate when compared to the control meganuclease that lacks said amino acid modification; or,
[0762] c) a higher in-vitro cutting when compared to the control meganuclease that lacks said amino acid modification; or,
[0763] d) any combination of (a), (b) and (c).
   38. A composition comprising at least one or more polypeptides of embodiment 29.
   39. A method for producing a meganuclease having increased activity over a range of temperatures, the method comprising:
[0764] a) producing a variant meganuclease by modifying at least one amino acid at an amino acid position corresponding to a position of SEQ ID NO:1 selected from the group consisting of positions 2, 12, 16, 22, 23, 31, 36, 43, 50, 56, 58, 59, 62, 71, 72, 73, 80, 81, 82, 86, 91, 95, 98, 103, 113, 114, 116, 117, 118, 121, 124, 128, 129, 131, 147, 151, 153, 159, 160, 161, 162, 163, 164, 165, 166, 167, 168, 169, 170, 171, 172, 173, 174, 175, 176, 177, 178, 179, 180, 182, 183, 184, 185, 186, 187, 188, 189, 190, 191, 192, 194, 195, 196, 197, 200, 203, 204, 209, 222, 232, 236, 237, 246, 254, 258, 267, 278, 281, 282, 289, 308, 311, 312, 316, 318, 319, 334, 339, 340, 342, 345, 346 348 and combinations thereof; and,
[0765] b) selecting said variant meganuclease from step a) and screening said variant meganuclease for the ability to cleave a DNA target sequence over a range of temperatures between and including 16° C. to 37° C.
   40. The method of embodiment 39, wherein said range of temperatures comprises:
[0766] a) 16° C.;
[0767] b) 18° C.;
[0768] c) 20° C.;
[0769] d) 24° C.;
[0770] e) 28° C.;
[0771] f) 30° C.;
[0772] g) 37° C.; or,
[0773] h) any combination of a), b), c), d), e), f), h), g) and g).
   41. A method for producing a meganuclease having an increased meganuclease activity when compared to a control meganuclease, the method comprising:
[0774] a) producing a variant meganuclease by modifying at least one amino acid at an amino acid position corresponding to a position of SEQ ID NO:1 selected from the group consisting of positions 2, 12, 16, 22, 23, 31, 36, 43, 50, 56, 58, 59, 62, 71, 72, 73, 80, 81, 82, 86, 91, 95, 98, 103, 113, 114, 116, 117, 118, 121, 124, 128, 129, 131, 147, 151, 153, 159, 160, 161, 162, 163, 164, 165, 166, 167, 168, 169, 170, 171, 172, 173, 174, 175, 176, 177, 178, 179, 180, 182, 183, 184, 185, 186, 187, 188, 189, 190, 191, 192, 194, 195, 196, 197, 200, 203, 204, 209, 222, 232, 236, 237, 246, 254, 258, 267, 278, 281, 282, 289, 308, 311, 312, 316, 318, 319, 334, 339, 340, 342, 345, 346, 348 and combinations thereof; and,
[0775] b) selecting the variant meganuclease from step a) and screening said variant for increased meganuclease activity when compared to a control meganuclease.
   42. The method of embodiment 41, wherein the increased meganuclease activity is evidenced by:
[0776] a) a higher yeast assay score when compared to the control meganuclease that lacks said amino acid modification; or,
[0777] b) a higher target site mutation rate when compared to the control meganuclease that lacks said amino acid modification; or,
[0778] c) a higher in-vitro cutting when compared to the control meganuclease that lacks said amino acid modification; or,
[0779] d) any combination of (a), (b) and (c).
   43. The isolated or recombinant polynucleotide of embodiment 1, wherein said meganuclease polypeptide comprises a linker polypeptide, wherein said linker polypeptide comprises:
[0780] a) SEQ ID NO:420;
[0781] b) SEQ ID NO:421;
[0782] c) SEQ ID NO:422; or,
[0783] d) an amino acid sequence consisting of any possible amino acid at positions corresponding to positions 156 to 193 of SEQ ID NO:1.
   44. A composition comprising at least one or more polynucleotides of embodiment 1.
   45. An isolated or recombinant polynucleotide encoding a meganuclease polypeptide, said polypeptide comprising an amino acid sequence having at least one amino acid modification at an amino acid position corresponding to a position of SEQ ID NO:1 selected from the group consisting of positions 16, 22, 50, 56, 59, 71, 81, 103, 121, 153, 185, 209, 222, 246, 258, 281, 308, 316, 345, 346, and combinations thereof, and wherein the polypeptide is capable of recognizing and cleaving a meganuclease target site comprising SEQ ID NO: 2.
   46. The isolated or recombinant polynucleotide of embodiment 45, wherein said nucleotide sequence encodes a meganuclease polypeptide having at least 80% sequence identity to SEQ ID NO: 1.
   47. The isolated or recombinant polynucleotide of embodiment 45, wherein said at least one amino acid modification comprises any one of the amino acid modifications shown in FIG. 5A-FIG. 5E.
   48. The isolated or recombinant polynucleotide of embodiment 45, wherein said nucleotide sequence encodes a meganuclease polypeptide selected from the group consisting of SEQ ID NOs: 14, 15, 16, 17, 18, 19, 20, 21, 22, 23, 24, 25, 26, 27, 28, 29, 30, 31, 32, 33, 34, 35, 36, 37 and 38.
   49. An isolated or recombinant polynucleotide encoding a meganuclease polypeptide, the polypeptide comprising an amino acid sequence having at least one amino acid modification at an amino acid position corresponding to a position of SEQ ID NO:86 selected from the group consisting of positions 2, 12, 16, 22, 23, 36, 43, 50, 56, 58, 59, 72, 73, 81, 86, 91, 95, 103, 113, 114, 120, 121, 124, 128, 129, 131, 151, 153, 200, 204, 209, 232, 236, 237, 246, 254, 258, 267, 281, 308, 311, 312, 316, 319, 334, 339, 340, 342, and combinations thereof, and wherein the polypeptide is capable of recognizing and cleaving a meganuclease target site comprising SEQ ID NO: 85.
   50. The isolated or recombinant polynucleotide of embodiment 49, wherein said nucleotide sequence encodes a meganuclease polypeptide having at least 80% sequence identity to SEQ ID NO: 86.
   51. The isolated or recombinant polynucleotide of embodiment 49, wherein said at least one amino acid modification comprises any one of the amino acid modifications shown in FIG. 9A-FIG. 9N.
   52. The isolated or recombinant polynucleotide of embodiment 49, wherein said nucleotide sequence encodes a meganuclease polypeptide selected from the group consisting of SEQ ID NOs: 87, 88, 89, 90, 91, 92, 93, 94, 95, 96, 97, 98, 99, 100, 101, 102, 103, 104, 105, 106, 107, 108, 109, 110, 111, 112, 113, 114, 115, 116, 117, 118, 119, 120, 121, 122, 123, 124, 125, 126, 127, 128, 129, 130, 131, 132, 133, 134, 135, 136, 137, 138, 139, 140, 141, 142, 143, 144, 145, 146, 147, 148, 149, 150, 151, 152, 153, 154, 155, 156, 157, 158, 159, 160, 161, 162, 163, 164, 165, 166, 167, 251, 252 and 253.
   53. An isolated or recombinant polynucleotide encoding a meganuclease polypeptide, the polypeptide comprising an amino acid sequence having at least one amino acid modification at an amino acid position corresponding to a position of SEQ ID NO:270 selected from the group consisting of positions 16, 22, 50, 71, 185, 246, 258, 316 and combinations thereof, and wherein the polypeptide is capable of recognizing and cleaving a meganuclease target site comprising SEQ ID NO: 269.
   54. The isolated or recombinant polynucleotide of embodiment 53, wherein said nucleotide sequence encodes a meganuclease polypeptide selected from the group consisting of SEQ ID NOs: 272, 273, 274 and 275.
   55. An isolated or recombinant polynucleotide encoding a meganuclease polypeptide, the polypeptide comprising an amino acid sequence having at least one amino acid modification at an amino acid position corresponding to a position of SEQ ID NO:282 selected from the group consisting of positions 12, 16, 22, 31, 50, 56, 59, 62, 81, 98, 103, 105, 116, 118, 121, 153, 159, 160, 161, 162, 163, 164, 165, 166, 167, 168, 169, 170, 171, 172, 173, 174, 175, 176, 177, 178, 179, 180, 182, 183, 184, 185, 186, 187, 188, 189, 190, 191, 192, 258, 281, 308, 312, 316, 319, and combinations thereof, and wherein the polypeptide is capable of recognizing and cleaving a meganuclease target site comprising SEQ ID NO:281.
   56. The isolated or recombinant polynucleotide of embodiment 55, wherein said nucleotide sequence encodes a meganuclease polypeptide having at least 80% sequence identity to SEQ ID NO: 282.
   57. The isolated or recombinant polynucleotide of embodiment 55, wherein said at least one amino acid modification comprises any one of the amino acid modifications shown in FIG. 10A-FIG. 10D.
   58. The isolated or recombinant polynucleotide of embodiment 55, wherein said nucleotide sequence encodes a meganuclease polypeptide selected from the group consisting of SEQ ID NOs: 284, 285, 286, 287, 288, 289, 290, 291, 292, 293, 294, 295, 296, 297 and 298.
   59. An isolated or recombinant polynucleotide encoding a meganuclease polypeptide, the polypeptide comprising an amino acid sequence having at least one amino acid modification at an amino acid position corresponding to a position of SEQ ID NO:329 selected from the group consisting of positions 12, 32, 50, 56, 80, 105, 124, 129, 131, 153, 185, 311, 316, 318, 340, and combinations thereof, and wherein the polypeptide is capable of recognizing and cleaving a meganuclease target site comprising SEQ ID NO: 328.
   60. The isolated or recombinant polynucleotide of embodiment 59, wherein said nucleotide sequence encodes a meganuclease polypeptide having at least 80% sequence identity to SEQ ID NO: 329.
   61. The isolated or recombinant polynucleotide of embodiment 59, wherein said at least one amino acid modification comprises any one of the amino acid modifications shown in FIG. 11.
   62. The isolated or recombinant polynucleotide of embodiment 59, wherein said nucleotide sequence encodes a meganuclease polypeptide selected from the group consisting of SEQ ID NOs: 330, 331, 332, 333, 334, 335, 336, 337, 338, 339, 340 and 341.
   63. An isolated or recombinant polynucleotide encoding a meganuclease polypeptide, the polypeptide comprising an amino acid sequence having at least one amino acid modification at an amino acid position corresponding to a position of SEQ ID NO:356 selected from the group consisting of positions 12, 24, 36, 50, 56, 62, 73, 80, 124, 129, 147, 182, 203, 237, 252, 311, 316, 318, 340, 348, and combinations thereof, and wherein the polypeptide is capable of recognizing and cleaving a meganuclease target site comprising SEQ ID NO: 355.
   64. The isolated or recombinant polynucleotide of embodiment 63, wherein said nucleotide sequence encodes a meganuclease polypeptide having at least 80% sequence identity to SEQ ID NO: 356.
   65. The isolated or recombinant polynucleotide of embodiment 63, wherein said at least one amino acid modification comprises any one of the amino acid modifications shown in FIG. 12.
   66. The isolated or recombinant polynucleotide of embodiment 63, wherein said nucleotide sequence encodes a meganuclease polypeptide selected from the group consisting of SEQ ID NOs: 357, 358, 359, 360, 361, 362, 363, 364, 365, 366, 367, 368, 369, 370, and 371.
   67. An isolated or recombinant polynucleotide encoding a meganuclease polypeptide, the polypeptide comprising an amino acid sequence having at least one amino acid modification at an amino acid position corresponding to a position of SEQ ID NO:389 selected from the group consisting of positions 12, 50, 56, 124, 129, 131, 153, 211, 237, 311, 316, and position 318, and combinations thereof, and wherein the polypeptide is capable of recognizing and cleaving a meganuclease target site comprising SEQ ID NO: 388.
   68. The isolated or recombinant polynucleotide of embodiment 67, wherein said nucleotide sequence encodes a meganuclease polypeptide having at least 80% sequence identity to SEQ ID NO: 389.
   69. The isolated or recombinant polynucleotide of embodiment 67, wherein said at least one amino acid modification comprises any one of the amino acid modifications shown in FIG. 13.
   70. The isolated or recombinant polynucleotide of embodiment 67, wherein said nucleotide sequence encodes a meganuclease polypeptide selected from the group consisting of SEQ ID NOs: 390, 391, 392, 393, 394, 395, 396, 397, 398, 399, 400, 401, 402, and 403.
   72. A yeast, plant, plant cell, explant or seed comprising the meganuclease created by the method of embodiments 36-42.
   73. A method of introducing a double-strand break in the genome of a yeast or plant cell, said method comprising:
[0784] a) contacting at least one plant or yeast cell comprising in its genome a meganuclease recognition site with a variant meganuclease polypeptide selected from the group consisting of SEQ ID NOs: 14, 15, 16, 17, 18, 19, 20, 21, 22, 23, 24, 25, 26, 27, 28, 29, 30, 31, 32, 33, 34, 35, 36, 37, 38, 87, 88, 89, 90, 91, 92, 93, 94, 95, 96, 97, 98, 99, 100, 101, 102, 103, 104, 105, 106, 107, 108, 109, 110, 111, 112, 113, 114, 115, 116, 117, 118, 119, 120, 121, 122, 123, 124, 125, 126, 127, 128, 129, 130, 131, 132, 133, 134, 135, 136, 137, 138, 139, 140, 141, 142, 143, 144, 145, 146, 147, 148, 149, 150, 151, 152, 153, 154, 155, 156, 157, 158, 159, 160, 161, 162, 163, 164, 165, 166, 167, 251, 252, 253, 272, 273, 274, 275, 272, 273, 274, 275, 284, 285, 286, 287, 288, 289, 290, 291, 292, 293, 294, 295, 296, 297, 298, 330, 331, 332, 333, 334, 335, 336, 337, 338, 339, 340, 341, 357, 358, 359, 360, 361, 362, 363, 364, 365, 366, 367, 368, 369, 370, 371, 390, 391, 392, 393, 394, 395, 396, 397, 398, 399, 400, 401, 402 and 403, wherein the variant meganuclease is capable of inducing a double-strand break in said recognition site; and,
[0785] b) selecting the yeast or plant cell from a) and screening said yeast or plant cell for any modification of said recognition sequence.
   74. A method of integrating a polynucleotide of interest into a recognition site in the genome of a plant or yeast cell, the method comprising:
[0786] a) contacting at least one plant or yeast cell comprising in its genome a meganuclease recognition site with:
[0787] (i) a variant meganuclease polypeptide selected from the group consisting of SEQ ID NOs: 14, 15, 16, 17, 18, 19, 20, 21, 22, 23, 24, 25, 26, 27, 28, 29, 30, 31, 32, 33, 34, 35, 36, 37, 38, 87, 88, 89, 90, 91, 92, 93, 94, 95, 96, 97, 98, 99, 100, 101, 102, 103, 104, 105, 106, 107, 108, 109, 110, 111, 112, 113, 114, 115, 116, 117, 118, 119, 120, 121, 122, 123, 124, 125, 126, 127, 128, 129, 130, 131, 132, 133, 134, 135, 136, 137, 138, 139, 140, 141, 142, 143, 144, 145, 146, 147, 148, 149, 150, 151, 152, 153, 154, 155, 156, 157, 158, 159, 160, 161, 162, 163, 164, 165, 166, 167, 251, 252, 253, 272, 273, 274, 275, 272, 273, 274, 275, 284, 285, 286, 287, 288, 289, 290, 291, 292, 293, 294, 295, 296, 297, 298, 330, 331, 332, 333, 334, 335, 336, 337, 338, 339, 340, 341, 357, 358, 359, 360, 361, 362, 363, 364, 365, 366, 367, 368, 369, 370, 371, 390, 391, 392, 393, 394, 395, 396, 397, 398, 399, 400, 401, 402 and 403,
[0788] wherein the variant meganuclease is capable of inducing a double-strand break in said recognition site; and,
[0789] (ii) a DNA fragment containing a polynucleotide of interest;
[0790] b) selecting at least one plant or yeast cell comprising integration of the polynucleotide of interest cassette at the recognition site.
   75. An isolated or recombinant polynucleotide encoding a meganuclease polypeptide, the polypeptide comprising an amino acid sequence having at least one amino acid modification at an amino acid position corresponding to a position of SEQ ID NO:429 selected from the group consisting of positions 16, 22, 50, 71, 185, 246, 258, 316 and combinations thereof, and wherein the polypeptide is capable of recognizing and cleaving a meganuclease target site comprising SEQ ID NO: 423.
   76. The isolated or recombinant polynucleotide of embodiment 75, wherein said nucleotide sequence encodes a meganuclease polypeptide selected from the group consisting of SEQ ID NOs: 430, 431 and 432.
   77. An isolated or recombinant polynucleotide encoding a meganuclease polypeptide of SEQ ID NOs: 436, wherein the polypeptide is capable of recognizing and cleaving a meganuclease target site comprising SEQ ID NO: 424.

### EXPERIMENTAL

### Example 1

### Transformation of Maize Immature Embryos

[0791] Transformation can be accomplished by various methods known to be effective in plants, including particle-mediated delivery, Agrobacterium-mediated transformation, PEG-mediated delivery, and electroporation.

[0792] a. Particle-Mediated Delivery

[0793] Transformation of maize immature embryos using particle delivery is performed as follows. Media recipes follow below.

[0794] The ears are husked and surface sterilized in 30% Clorox bleach plus 0.5% Micro detergent for 20 minutes, and rinsed two times with sterile water. The immature embryos are isolated and placed embryo axis side down (scutellum side up), 25 embryos per plate, on 560Y medium for 4 hours and then aligned within the 2.5-cm target zone in preparation for bombardment. Alternatively, isolated embryos are placed on 560L (Initiation medium) and placed in the dark at temperatures ranging from 26° C. to 37° C. for 8 to 24 hours prior to placing on 560Y for 4 hours at 26° C. prior to bombardment as described above.

[0795] Plasmids containing the double strand brake inducing agent and donor DNA are constructed using standard molecular biology techniques and co-bombarded with plasmids containing the developmental genes ODP2 (AP2 domain transcription factor ODP2 (Ovule development protein 2); US20090328252 A1) and Wushel (US2011/0167516).

[0796] The plasmids and DNA of interest are precipitated onto 0.6 μm (average diameter) gold pellets using a water-soluble cationic lipid Tfx™-50 (Cat# E1811, Promega, Madison, Wis., USA) as follows. DNA solution is prepared on ice using 1 g of plasmid DNA and optionally other constructs for co-bombardment such as 50 ng (0.5 l) of each plasmid containing the developmental genes ODP2 (AP2 domain transcription factor ODP2 (Ovule development protein 2); US20090328252 A1) and Wushel. To the pre-mixed DNA, 20 μl of prepared gold particles (15 mg/ml) and 5 l Tfx-50 is added in water and mixed carefully. Gold particles are pelleted in a microfuge at 10,000 rpm for 1 min and supernatant is removed. The resulting pellet is carefully rinsed with 100 ml of 100% EtOH without resuspending the pellet and the EtOH rinse is carefully removed. 105 l of 100% EtOH is added and the particles are resuspended by brief sonication. Then, 10 μl is spotted onto the center of each macrocarrier and allowed to dry about 2 minutes before bombardment.

[0797] Alternatively, the plasmids and DNA of interest are precipitated onto 1.1 μm (average diameter) tungsten pellets using a calcium chloride (CaCl₂) precipitation procedure by mixing 100 μl prepared tungsten particles in water, 10 μl (1 μg) DNA in Tris EDTA buffer (1 μg total DNA), 100 μl 2.5 M CaCl₂, and 10 μl 0.1 M spermidine. Each reagent is added sequentially to the tungsten particle suspension, with mixing. The final mixture is sonicated briefly and allowed to incubate under constant vortexing for 10 minutes. After the precipitation period, the tubes are centrifuged briefly, liquid is removed, and the particles are washed with 500 ml 100% ethanol, followed by a 30 second centrifugation. Again, the liquid is removed, and 105 μl 100% ethanol is added to the final tungsten particle pellet. For particle gun bombardment, the tungsten/DNA particles are briefly sonicated. 10 μl of the tungsten/DNA particles is spotted onto the center of each macrocarrier, after which the spotted particles are allowed to dry about 2 minutes before bombardment.

[0798] The sample plates are bombarded at level #4 with a Biorad Helium Gun. All samples receive a single shot at 450 PSI, with a total of ten aliquots taken from each tube of prepared particles/DNA.

[0799] Following bombardment, the embryos are incubated on 560P (maintenance medium) for 12 to 48 hours at temperatures ranging from 26 C to 37 C, and then placed at 26 C. After 5 to 7 days the embryos are transferred to 560R selection medium containing 3 mg/liter Bialaphos, and subcultured every 2 weeks at 26 C. After approximately 10 weeks of selection, selection-resistant callus clones are transferred to 288J medium to initiate plant regeneration. Following somatic embryo maturation (2-4 weeks), well-developed somatic embryos are transferred to medium for germination and transferred to a lighted culture room. Approximately 7-10 days later, developing plantlets are transferred to 272V hormone-free medium in tubes for 7-10 days until plantlets are well established. Plants are then transferred to inserts in flats (equivalent to a 2.5″ pot) containing potting soil and grown for 1 week in a growth chamber, subsequently grown an additional 1-2 weeks in the greenhouse, then transferred to Classic 600 pots (1.6 gallon) and grown to maturity. Plants are monitored and scored for transformation efficiency, and/or modification of regenerative capabilities.

[0800] Initiation medium (560L) comprises 4.0 g/l N6 basal salts (SIGMA C-1416), 1.0 ml/l Eriksson's Vitamin Mix (1000×SIGMA-1511), 0.5 mg/l thiamine HCl, 20.0 g/l sucrose, 1.0 mg/l 2,4-D, and 2.88 g/l L-proline (brought to volume with D-I H2O following adjustment to pH 5.8 with KOH); 2.0 g/l Gelrite (added after bringing to volume with D-I H2O); and 8.5 mg/l silver nitrate (added after sterilizing the medium and cooling to room temperature).

[0801] Maintenance medium (560P) comprises 4.0 g/l N6 basal salts (SIGMA C-1416), 1.0 ml/l Eriksson's Vitamin Mix (1000×SIGMA-1511), 0.5 mg/l thiamine HCl, 30.0 g/l sucrose, 2.0 mg/l 2,4-D, and 0.69 g/l L-proline (brought to volume with D-I H2O following adjustment to pH 5.8 with KOH); 3.0 g/l Gelrite (added after bringing to volume with D-I H2O); and 0.85 mg/l silver nitrate (added after sterilizing the medium and cooling to room temperature).

[0802] Bombardment medium (560Y) comprises 4.0 g/l N6 basal salts (SIGMA C-1416), 1.0 ml/l Eriksson's Vitamin Mix (1000×SIGMA-1511), 0.5 mg/l thiamine HCl, 120.0 g/l sucrose, 1.0 mg/l 2,4-D, and 2.88 g/l L-proline (brought to volume with D-I H2O following adjustment to pH 5.8 with KOH); 2.0 g/l Gelrite (added after bringing to volume with D-I H2O); and 8.5 mg/l silver nitrate (added after sterilizing the medium and cooling to room temperature).

Selection medium (560R) comprises 4.0 g/l N6 basal salts (SIGMA C-1416), 1.0 ml/l Eriksson's Vitamin Mix (1000×SIGMA-1511), 0.5 mg/l thiamine HCl, 30.0 g/l sucrose, and 2.0 mg/l 2,4-D (brought to volume with D-I H2O following adjustment to pH 5.8 with KOH); 3.0 g/l Gelrite (added after bringing to volume with D-I H2O); and 0.85 mg/l silver nitrate and 3.0 mg/l bialaphos (both added after sterilizing the medium and cooling to room temperature).

[0803] Plant regeneration medium (288J) comprises 4.3 g/l MS salts (GIBCO 11117-074), 5.0 ml/l MS vitamins stock solution (0.100 g nicotinic acid, 0.02 g/l thiamine HCL, 0.10 g/l pyridoxine HCL, and 0.40 g/l glycine brought to volume with polished D-I H2O) (Murashige and Skoog (1962) Physiol. Plant. 15:473), 100 mg/l myo-inositol, 0.5 mg/l zeatin, 60 g/l sucrose, and 1.0 ml/l of 0.1 mM abscisic acid (brought to volume with polished D-I H2O after adjusting to pH 5.6); 3.0 g/l Gelrite (added after bringing to volume with D-I H2O); and 1.0 mg/l indoleacetic acid and 3.0 mg/l bialaphos (added after sterilizing the medium and cooling to 60° C.).

Hormone-free medium (272V) comprises 4.3 g/l MS salts (GIBCO 11117-074), 5.0 ml/l MS vitamins stock solution (0.100 g/l nicotinic acid, 0.02 g/l thiamine HCL, 0.10 g/l pyridoxine HCL, and 0.40 g/l glycine brought to volume with polished D-I H2O), 0.1 g/1 myo-inositol, and 40.0 g/l sucrose (brought to volume with polished D-I H2O after adjusting pH to 5.6); and 6 g/l bacto-agar (added after bringing to volume with polished D-I H2O), sterilized and cooled to 60° C.

[0804] b. Agrobacterium-Mediated Transformation

[0805] Agrobacterium-mediated transformation was performed essentially as described in Djukanovic et al. (2006) Plant Biotech J 4:345-57. Briefly, 10-12 day old immature embryos (0.8-2.5 mm in size) were dissected from sterilized kernels and placed into liquid medium (4.0 g/L N6 Basal Salts (Sigma C-1416), 1.0 ml/L Eriksson's Vitamin Mix (Sigma E-1511), 1.0 mg/L thiamine HCl, 1.5 mg/L 2,4-D, 0.690 g/L L-proline, 68.5 g/L sucrose, 36.0 g/L glucose, pH 5.2). After embryo collection, the medium was replaced with 1 ml Agrobacterium at a concentration of 0.35-0.45 OD550. Maize embryos were incubated with Agrobacterium for 5 min at room temperature, then the mixture was poured onto a media plate containing 4.0 g/L N6 Basal Salts (Sigma C-1416), 1.0 ml/L Eriksson's Vitamin Mix (Sigma E-1511), 1.0 mg/L thiamine HCl, 1.5 mg/L 2,4-D, 0.690 g/L L-proline, 30.0 g/L sucrose, 0.85 mg/L silver nitrate, 0.1 nM acetosyringone, and 3.0 g/L Gelrite, pH 5.8. Embryos were incubated axis down, in the dark for 3 days at 20° C., then incubated 4 days in the dark at 28° C., then transferred onto new media plates containing 4.0 g/L N6 Basal Salts (Sigma C-1416), 1.0 ml/L Eriksson's Vitamin Mix (Sigma E-1511), 1.0 mg/L thiamine HCl, 1.5 mg/L 2,4-D, 0.69 g/L L-proline, 30.0 g/L sucrose, 0.5 g/L MES buffer, 0.85 mg/L silver nitrate, 3.0 mg/L Bialaphos, 100 mg/L carbenicillin, and 6.0 g/L agar, pH 5.8. Embryos were subcultured every three weeks until transgenic events were identified. Somatic embryogenesis was induced by transferring a small amount of tissue onto regeneration medium (4.3 g/L MS salts (Gibco 11117), 5.0 ml/L MS Vitamins Stock Solution, 100 mg/L myo-inositol, 0.1 μM ABA, 1 mg/L IAA, 0.5 mg/L zeatin, 60.0 g/L sucrose, 1.5 mg/L Bialaphos, 100 mg/L carbenicillin, 3.0 g/L Gelrite, pH 5.6) and incubation in the dark for two weeks at 28° C. All material with visible shoots and roots were transferred onto media containing 4.3 g/L MS salts (Gibco 11117), 5.0 ml/L MS Vitamins Stock Solution, 100 mg/L myo-inositol, 40.0 g/L sucrose, 1.5 g/L Gelrite, pH 5.6, and incubated under artificial light at 28° C. One week later, plantlets were moved into glass tubes containing the same medium and grown until they were sampled and/or transplanted into soil.

### Example 2

### Transient Expression of BBM Enhances Transformation

[0806] Parameters of the transformation protocol can be modified to ensure that the BBM activity is transient. One such method involves precipitating the BBM-containing plasmid in a manner that allows for transcription and expression, but precludes subsequent release of the DNA, for example, by using the chemical PEI.

In one example, the BBM plasmid is precipitated onto gold particles with PEI, while the transgenic expression cassette (UBI::moPAT˜GFPm::PinII; moPAT is the maize optimized PAT gene) to be integrated is precipitated onto gold particles using the standard calcium chloride method.

[0807] Briefly, gold particles were coated with PEI as follows. First, the gold particles were washed. Thirty-five mg of gold particles, 1.0 in average diameter (A.S.I. #162-0010), were weighed out in a microcentrifuge tube, and 1.2 ml absolute EtOH was added and vortexed for one minute. The tube was incubated for 15 minutes at room temperature and then centrifuged at high speed using a microfuge for 15 minutes at 4° C. The supernatant was discarded and a fresh 1.2 ml aliquot of ethanol (EtOH) was added, vortexed for one minute, centrifuged for one minute, and the supernatant again discarded (this is repeated twice). A fresh 1.2 ml aliquot of EtOH was added, and this suspension (gold particles in EtOH) was stored at −20° C. for weeks. To coat particles with polyethylimine (PEI; Sigma #P3143), 250 μl of the washed gold particle/EtOH mix was centrifuged and the EtOH discarded. The particles were washed once in 100 μl ddH2O to remove residual ethanol, 250 μl of 0.25 mM PEI was added, followed by a pulse-sonication to suspend the particles and then the tube was plunged into a dry ice/EtOH bath to flash-freeze the suspension, which was then lyophilized overnight. At this point, dry, coated particles could be stored at −80° C. for at least 3 weeks. Before use, the particles were rinsed 3 times with 250 μl aliquots of 2.5 mM HEPES buffer, pH 7.1, with 1× pulse-sonication, and then a quick vortex before each centrifugation. The particles were then suspended in a final volume of 250 μl HEPES buffer. A 25 μl aliquot of the particles was added to fresh tubes before attaching DNA. To attach uncoated DNA, the particles were pulse-sonicated, then 1 μg of DNA (in 5 μl water) was added, followed by mixing by pipetting up and down a few times with a Pipetteman and incubated for 10 minutes. The particles were spun briefly (i.e. 10 seconds), the supernatant removed, and 60 μl EtOH added. The particles with PEI-precipitated DNA-1 were washed twice in 60 μl of EtOH. The particles were centrifuged, the supernatant discarded, and the particles were resuspended in 45 μl water. To attach the second DNA (DNA-2), precipitation using TFX-50 was used. The 45 μl of particles/DNA-1 suspension was briefly sonicated, and then 5 μl of 100 ng/μl of DNA-2 and 2.5 μl of TFX-50 were added. The solution was placed on a rotary shaker for 10 minutes, centrifuged at 10,000 g for 1 minute. The supernatant was removed, and the particles resuspended in 60 μl of EtOH. The solution was spotted onto macrocarriers and the gold particles onto which DNA-1 and DNA-2 had been sequentially attached were delivered into scutellar cells of 10 DAP Hi-II immature embryos using a standard protocol for the PDS-1000. For this experiment, the DNA-1 plasmid contained a UBI::RFP::pinII expression cassette, and DNA-2 contained a UBI::CFP::pinII expression cassette. Two days after bombardment, transient expression of both the CFP and RFP fluorescent markers was observed as numerous red & blue cells on the surface of the immature embryo. The embryos were then placed on non-selective culture medium and allowed to grow for 3 weeks before scoring for stable colonies. After this 3-week period, 10 multicellular, stably-expressing blue colonies were observed, in comparison to only one red colony. This demonstrated that PEI-precipitation could be used to effectively introduce DNA for transient expression while dramatically reducing integration of the PEI-introduced DNA and thus reducing the recovery of RFP-expressing transgenic events. In this manner, PEI-precipitation can be used to deliver transient expression of BBM and/or WUS2.

[0808] For example, the particles are first coated with UBI::BBM::pinII using PEI, then coated with UBI::moPAT˜YFP using TFX-50, and then bombarded into scutellar cells on the surface of immature embryos. PEI-mediated precipitation results in a high frequency of transiently expressing cells on the surface of the immature embryo and extremely low frequencies of recovery of stable transformants (relative to the TFX-50 method). Thus, it is expected that the PEI-precipitated BBM cassette expresses transiently and stimulates a burst of embryogenic growth on the bombarded surface of the tissue (i.e. the scutellar surface), but this plasmid will not integrate. The PAT˜GFP plasmid released from the Ca++/gold particles is expected to integrate and express the selectable marker at a frequency that results in substantially improved recovery of transgenic events. As a control treatment, PEI-precipitated particles containing a UBI::GUS::pinII (instead of BBM) are mixed with the PAT˜GFP/Ca++ particles. Immature embryos from both treatments are moved onto culture medium containing 3 mg/l bialaphos. After 6-8 weeks, it is expected that GFP+, bialaphos-resistant calli will be observed in the PEI/BBM treatment at a much higher frequency relative to the control treatment (PEI/GUS).

As an alternative method, the BBM plasmid is precipitated onto gold particles with PEI, and then introduced into scutellar cells on the surface of immature embryos, and subsequent transient expression of the BBM gene elicits a rapid proliferation of embryogenic growth. During this period of induced growth, the explants are treated with Agrobacterium using standard methods for maize (see Example 1), with T-DNA delivery into the cell introducing a transgenic expression cassette such as UM::moPAT˜GFPm::pinII. After co-cultivation, explants are allowed to recover on normal culture medium, and then are moved onto culture medium containing 3 mg/l bialaphos. After 6-8 weeks, it is expected that GFP+, bialaphos-resistant calli will be observed in the PEI/BBM treatment at a much higher frequency relative to the control treatment (PEI/GUS).

[0809] It may be desirable to “kick start” callus growth by transiently expressing the BBM and/or WUS2 polynucleotide products. This can be done by delivering BBM and WUS2 5′-capped polyadenylated RNA, expression cassettes containing BBM and WUS2 DNA, or BBM and/or WUS2 proteins. All of these molecules can be delivered using a biolistics particle gun. For example 5′-capped polyadenylated BBM and/or WUS2 RNA can easily be made in vitro using Ambion's mMessage mMachine kit. RNA is co-delivered along with DNA containing a polynucleotide of interest and a marker used for selection/screening such as Ubi::moPAT˜GFPm::PinII. It is expected that the cells receiving the RNA will immediately begin dividing more rapidly and a large portion of these will have integrated the agronomic gene. These events can further be validated as being transgenic clonal colonies because they will also express the PAT˜GFP fusion protein (and thus will display green fluorescence under appropriate illumination). Plants regenerated from these embryos can then be screened for the presence of the polynucleotide of interest.

### Example 3

### DNA Shuffling to Create Variants of LIG3-4 Meganuclease

### A. LIG3-4 Meganuclease and LIG3-4 Recognition Sequence

[0810] An endogenous maize genomic target site comprising the LIG3-4 recognition sequence (SEQ ID NO: 2) was selected for design of a custom double-strand break inducing agent. The LIG3-4 recognition sequence is a 22 bp polynucleotide having the following sequence: ATATACCTCACACGTACGCGTA (SEQ ID NO: 2).

[0811] Wild type I-CreI meganuclease (SEQ ID NO: 3) was modified to produce the LIG3-4 meganuclease designed to recognize the LIG3-4 recognition sequence as described in US patent publication 2009-0133152 A1. Wild-type I-CreI meganuclease is a homodimer. In order to recognize the LIG3-4 recognition sequence, different substitutions were made to each monomer and the coding sequences for each monomer were joined by a linker sequence to produce a single-chain fusion polypeptide (LIG3-4, SEQ ID NO: 1)

### B. Creation of LIG3-4 Meganuclease Variants

[0812] Variants of the LIG3-4 meganuclease were created through gene shuffling methods. Gene shuffling is an iterative process consisting of discrete cycles termed “rounds”. Each round is a cycle of parent selection, library construction, gene evaluation and hit selection. The best hits from one round become the parental genes for the next round.

[0813] The first phase of LIG3-4 meganuclease optimization was designed to introduce amino acid substitutions as found in naturally occurring meganuclease proteins. Shuffled gene variant libraries were made based on the LIG3-4 protein template (SEQ ID NO: 1) using techniques including family shuffling, single-gene shuffling, back-crossing, semi-synthetic and synthetic shuffling (Zhang J-H et al. (1997) Proc Natl Acad Sci 94, 4504-4509; Crameri et al. (1998) Nature 391: 288-291; Ness et al. (2002) Nat Biotech 20:1251-1255). Libraries were based on phylogenetic sequence diversity, random mutagenesis, and structural features based on the crystal structure of I-CreI in Protein Data Bank (PDB). Phylogenetic diversity of several meganuclease proteins (SEQ ID NO: 4-13), including I-CreI (SEQ ID NO: 3) is shown in FIG. 1A-FIG. 1B. Diversity is defined as the amino acids present within the set of proteins at any position where all proteins do not contain the identical amino acid.

[0814] The shuffling process resulted in generation of LIG3-4 variants with recombinations of amino acid modifications, unintended amino acid modifications due to mutagenic PCR, deletions, and insertions (SEQ ID NOs:14-38). Corresponding DNA sequences for expression of these meganucleases in yeast are shown in SEQ ID NOs: 40-65).

### Example 4

### Yeast Screening System for Identification of Meganuclease Variants with Increased Activity

[0815] Yeast screening strains were generated as hosts for the identification of meganuclease variants. The yeast Ade2 gene (Genetika 1987 Jul.-23(7):1141-8) (SEQ ID NO: 82) was used as a visible marker as well as a selection in the scheme depicted in FIG. 2. Gene fragments corresponding to the first 1000 nucleotides of the Ade2 coding sequence (SEQ ID NO: 83) (Ade2 5′ fragment) and the last 1011 nucleotides of the Ade2 coding sequence (Ade2 3′ fragment) were disrupted by a fragment including the yeast ura3 gene and meganuclease recognition sites. Three versions of the construct depicted in FIG. 2 were used. Plasmid pHD1327 (SEQ ID NO: 84) included the ZM6.3, ZM6.22, MHP42, MHP107 and LIG3-4 recognition sites. pVER8145 included the LIG3-4 recognition site, and pVER8189 included the MHP14, MHP77 and LIG3-4 recognition sites. There are 305 nucleotides of sequence duplication between the Ade2 5′ fragment and the Ade2 3′ fragment. The resulting constructs were used to replace the Ade2 gene (chromosome 15 nucleotide position 566193-564480) of yeast strain BY4247. The resulting yeast screening strains VER8145, VER8189 and HD1327 can be characterized as BY4742 MATa his3delta1 leu2delta0 lys2delta0 ura3delta0 Gal2+). If meganuclease cutting occurs between the duplicated sequences, homologous recombination can occur, resulting in a functional Ade2 gene.

[0816] The generation of a functional Ade2 gene can be used as a selection: when yeast cells are grown on media lacking adenine, only those with a functional Ade2 gene are able to grow.

[0817] The generation of a functional Ade2 gene can also be used as a screen. Yeast cells with a functional Ade2 gene are white, whereas those lacking Ade2 function exhibit red pigmentation due to accumulation of a metabolite earlier in the adenine biosynthetic pathway resulting in red colonies with white sectors as shown in FIGS. 2 and 3. The degree of white sectoring, sometimes extending to entire colonies, indicates the amount of meganuclease cutting activity. Since the sectoring phenotype is a qualitative measure of meganuclease activity, a 0-4 numerical scoring system was implemented. As shown in FIG. 3, a score of 0 indicates that no white sectors (no meganuclease cutting) were observed; a score of 4 indicates completely white colonies (complete cutting of the recognition site); scores of 1-3 indicate intermediate white sectoring phenotypes (and intermediate degrees of recognition site cutting).

### Example 5

### Meganuclease Expression Plasmid

[0818] A meganuclease expression plasmid was constructed using the plasmid p415GAL1 (ATCC; Nucleic Acids Res. 1994 Dec. 25; 22(25):5767-8). The LIG3-4 coding sequence was PCR amplified using primers MN031 (SEQ ID NO: 66) and MN022 (SEQ ID NO: 67) and inserted in p415GAL1 as an XbaI-XhoI restriction fragment. The resulting construct (pVER8134; SEQ ID NO: 68) is shown in FIG. 4. The meganuclease expression plasmid contains a centromeric replication origin and a leu2 nutritional marker for growth in yeast as well as the F1 replication origin and an ampicillin antibiotic resistance gene for growth in E. coli. The meganuclease expression cassette consists of the galactose-inducible GAL1 promoter and the CYC1 terminator. The meganuclease coding sequence was preceded with a nuclear localization signal (SEQ ID NO: 69) encoding a 9 amino acid amino-terminal (MAPKKKRKV, SEQ ID NO: 70) and a carboxy-terminal 6× histidine tag (SEQ ID NO: 71) to aid protein purification.

[0819] Similar meganuclease expression plasmids were constructed by exchanging the LIG3-4 meganuclease (nucleotide positions 500-1549 of pVER8134, SEQ ID NO: 68) with a variant meganuclease.

### Example 6

### Transformation of the Yeast Screening Strain (YSS) and Screening for Meganuclease Activity in Yeast

[0820] Shuffled meganuclease libraries (comprising the variant meganucleases) were inserted in the expression vector pVER8134 as described in Example 5 and transformed into a yeast screening strain comprising the corresponding meganuclease recognition site (Example 3) by the following procedure.

[0821] A 3 mL culture of selective media (MP Biomedical) was inoculated with a single colony of the yeast screening strain and grown at 30° C. overnight. On the following day, a 50 ml YPD culture (MP Biomedical) was started with 2 ml of the overnight culture and grown at 30° C. overnight. On the following day, the cells were harvested by centrifugation at 4000 rpm. The cells were resuspended in 100 ml ice cold water and centrifuged again. The cells were then washed in 1.2 M sorbitol, followed by treatment with 2 ml of 10 mM Tris pH 8.0, 1 mM EDTA, 100 mM Lithium acetate, 10 mM DTT, 0.6M sorbitol for 30 minutes at 30° C. with shaking. The cells were recovered by centrifugation, washed in 40 ml 1.2M sorbitol and finally resuspended in 250 microliters of 1.2M sorbitol. 50 microliter aliquots were transferred to test tubes on ice. Up to 5 microliters of DNA (100-500 nanograms) were added. The suspension was transferred to a 0.2 cm electroporation cuvette, on ice. Electroporation was performed with a pulse charge at 1.5 kV, 200 ohms, 25 microF (pulse time of 5 milliseconds). 1 mL YPD media (MP Biomedical) was added and the cells were allowed to recover at 30° C. for 1-2 hr. The cells were centrifuged, resuspended in 100 uL 1M sorbitol and plated on selective media lacking leucine and containing 2% galactose. The resulting yeast colonies were incubated at various temperatures ranging from 22 to 37 degrees Celsius for 7-10 days. I-CreI and meganucleases derived from it have maximal activity at or above 37 degrees Celsius. Screening was performed at a range of temperatures from 22 to 37 degrees in order to observe increases in activity at lower temperatures which are relevant to certain biological systems (eg. plant cells, plant cell cultures, etc). At that time the red/white sectoring phenotype, indicative of meganuclease activity was observed. Colonies with increased white sectoring over the parental meganuclease (indicating colonies expressing a meganuclease with increased meganuclease activity), also referred to as “hits” and sometimes completely white, were isolated for further analysis.

[0822] These potential “hits” were grown in liquid media to increase the cell density. DNA was extracted and used to transform E. coli. Plasmid DNA was extracted from E. coli cultures. The plasmid DNA corresponding to the potential hits was again transformed into the yeast screening strain as described above.

[0823] If the increase in white sectoring phenotype in yeast cells comprising the variant meganuclease (when compared to yeast comprising the parental meganuclease) was repeated, the variant was declared a “confirmed hit”. Meganuclease coding sequences were determined for confirmed hits. Each confirmed hit represents a variant meganuclease and was assigned a meganuclease activity score at various temperatures based on the 0-4 scale described in Example 4.

[0824] Table 2 shows the activity of LIG3-4 and LIG3-4 variant meganucleases in Yeast Screening Strain VER8145 assayed at 22° C. and 30° C. with 2% galactose. A score of 0 indicates that no white sectors (no cutting indicating no meganuclease activity) was observed; a score of 4 indicates completely white colonies (complete cutting of the recognition site indicating high meganuclease activity); scores of 1-3 indicate intermediate white sectoring phenotypes (and intermediate degrees of recognition site cutting) was indicative of intermediate meganuclease activity.

TABLE 2
Activity of LIG3-4 and LIG3-4 variant Meganucleases in Yeast
Screening Strain assayed at 22° C. and 30° C.

| | | Assay score | Assay score |
|---|---|---|---|
| SEQ ID NO: | Meganuclease | 22° C. | 30° C. |
| 1 | LIG3-4 | 0 | 2 |
| 27 | LIG3-4(B65) | 4 | 4 |
| 28 | LIG3-4(B70) | 4 | 4 |
| 31 | LIG3-4(B75) | 4 | 4 |
| 32 | LIG3-4(B76) | 4 | 4 |
| 30 | LIG3-4(B73) | 4 | 4 |
| 34 | LIG3-4(B82) | 4 | 4 |
| 33 | LIG3-4(B78) | 4 | 4 |
| 18 | LIG3-4(B1) | 3.5 | 4 |
| 15 | LIG3-4(15) | 3 | 4 |
| 38 | LIG3-4(D8) | 2.5 | 4 |
| 19 | LIG3-4(B15) | 2.5 | 4 |
| 35 | LIG3-4(C1) | 2 | 4 |
| 29 | LIG3-4(B71) | 2 | 4 |
| 24 | LIG3-4(B39) | 1 | 4 |
| 20 | LIG3-4(B16) | 0.5 | 4 |
| 37 | LIG3-4(D7) | 0.5 | 4 |
| 23 | LIG3-4(B38) | 0 | 4 |
| 25 | LIG3-4(B40) | 0 | 4 |
| 22 | LIG3-4(B36) | 0 | 4 |
| 21 | LIG3-4(B24) | 0 | 4 |
| 26 | LIG3-4(B55) | 0 | 4 |
| 16 | LIG3-4(A4) | 0 | 3.5 |
| 36 | LIG3-4(D5) | 1 | 3 |
| 14 | LIG3-4(7) | 1 | 3 |
| 17 | LIG3-4(A6) | 0 | 3 |

Alignment of the LIG3-4 variants relative to the LIG3-4 parent (LIG3-4.pro) is shown in FIG. 5A-FIG. 5E.

[0825] The various assay conditions are indicative of meganuclease activity, allowing a precise ranking of the shuffled variants by activity. Large increases in meganuclease activity (high scores) were observed. Complete cutting of the recognition site was observed with some variants even at the low temperature of 22° C. This is significant because the optimal temperature for I-Cre type meganucleases is 37° C., whereas the optimal temperature for certain biological systems (eg. plant cell cultures) is in the range of 22-25 degrees Celsius. Hence, these variant meganucleases that can cut at lower temperatures are better suited to function well in plant systems when compared to the parental I-Cre type meganuclease.

Table 3A and 3B represent the amino acid modifications of LIG3-4 variants relative to the LIG3-4 parental meganuclease.

TABLE 3A
Amino acid modifications of LIG3-4 variants relative to the LIG3-4.

| SEQ ID NO | Meganuclease | 16 | 19 | 22 | 50 | 54 | 56 | 59 | 71 | 81 | 103 | 121 | 132 | 153 |
|---|---|---|---|---|---|---|---|---|---|---|---|---|---|---|
| 1 | LIG3-4 | F | G | S | Q | F | D | V | G | I | N | K | I | D |
| 27 | LIG3-4(B65) | _{—} | _{—} | C | K | _{—} | _{—} | _{—} | K | _{—} | _{—} | _{—} | _{—} | _{—} |
| 28 | LIG3-4(B70) | _{—} | _{—} | C | K | _{—} | _{—} | _{—} | K | _{—} | _{—} | _{—} | _{—} | _{—} |
| 31 | LIG3-4(B75) | _{—} | _{—} | C | K | _{—} | _{—} | _{—} | P | _{—} | _{—} | _{—} | _{—} | _{—} |
| 32 | LIG3-4(B76) | _{—} | _{—} | C | K | _{—} | _{—} | _{—} | _{—} | _{—} | _{—} | _{—} | _{—} | _{—} |
| 30 | LIG3-4(B73) | _{—} | _{—} | C | _{—} | _{—} | _{—} | _{—} | K | _{—} | _{—} | _{—} | _{—} | _{—} |
| 34 | LIG3-4(B82) | _{—} | _{—} | C | K | _{—} | _{—} | _{—} | K | _{—} | _{—} | _{—} | _{—} | _{—} |
| 33 | LIG3-4(B78) | _{—} | _{—} | C | _{—} | _{—} | _{—} | _{—} | P | _{—} | _{—} | _{—} | _{—} | _{—} |
| 18 | LIG3-4(B1) | _{—} | _{—} | C | _{—} | _{—} | _{—} | _{—} | P | _{—} | _{—} | _{—} | _{—} | _{—} |
| 15 | LIG3-4(15) | _{—} | S | _{—} | _{—} | _{—} | _{—} | _{—} | _{—} | _{—} | _{—} | _{—} | _{—} | _{—} |
| 38 | LIG3-4(D8) | _{—} | _{—} | _{—} | _{—} | I | _{—} | H | _{—} | _{—} | _{—} | G | _{—} | _{—} |
| 19 | LIG3-4(B15) | _{—} | _{—} | C | _{—} | _{—} | _{—} | _{—} | _{—} | _{—} | _{—} | _{—} | _{—} | _{—} |
| 35 | LIG3-4(C1) | _{—} | _{—} | C | _{—} | _{—} | _{—} | _{—} | K | _{—} | _{—} | _{—} | _{—} | _{—} |
| 29 | LIG3-4(B71) | _{—} | _{—} | C | _{—} | _{—} | _{—} | _{—} | K | _{—} | _{—} | _{—} | _{—} | _{—} |
| 24 | LIG3-4(B39) | _{—} | _{—} | C | _{—} | _{—} | _{—} | _{—} | P | _{—} | _{—} | _{—} | _{—} | _{—} |
| 20 | LIG3-4(B16) | _{—} | _{—} | C | K | _{—} | _{—} | _{—} | _{—} | _{—} | _{—} | _{—} | _{—} | _{—} |
| 37 | LIG3-4(D7) | _{—} | _{—} | _{—} | R | _{—} | L | _{—} | _{—} | K | _{—} | _{—} | _{—} | L |
| 23 | LIG3-4(B38) | _{—} | _{—} | C | _{—} | _{—} | _{—} | _{—} | _{—} | _{—} | _{—} | _{—} | _{—} | _{—} |
| 25 | LIG3-4(B40) | _{—} | _{—} | _{—} | K | _{—} | _{—} | _{—} | _{—} | _{—} | _{—} | _{—} | _{—} | _{—} |
| 22 | LIG3-4(B36) | _{—} | _{—} | _{—} | _{—} | _{—} | _{—} | _{—} | K | _{—} | _{—} | _{—} | _{—} | _{—} |
| 21 | LIG3-4(B24) | _{—} | _{—} | C | _{—} | _{—} | _{—} | _{—} | _{—} | _{—} | _{—} | | _{—} | _{—} |
| 26 | LIG3-4(B55) | _{—} | _{—} | C | _{—} | _{—} | _{—} | _{—} | _{—} | _{—} | _{—} | _{—} | _{—} | _{—} |
| 16 | LIG3-4(A4) | _{—} | _{—} | _{—} | _{—} | _{—} | _{—} | _{—} | _{—} | _{—} | _{—} | _{—} | V | _{—} |
| 36 | LIG3-4(D5) | _{—} | _{—} | _{—} | _{—} | _{—} | _{—} | _{—} | _{—} | K | V | _{—} | _{—} | M |
| 14 | LIG3-4(7) | I | _{—} | _{—} | _{—} | _{—} | _{—} | _{—} | _{—} | _{—} | _{—} | _{—} | _{—} | _{—} |
| 17 | LIG3-4(A6) | _{—} | _{—} | _{—} | _{—} | _{—} | _{—} | _{—} | _{—} | _{—} | _{—} | _{—} | V | _{—} |

TABLE 3B
(continued from Table 3A)

| SEQ ID NO | Meganuclease | 185 | 209 | 222 | 244 | 246 | 258 | 281 | 308 | 316 | 319 | 345 | 346 |
|---|---|---|---|---|---|---|---|---|---|---|---|---|---|
| 1 | LIG3-4 | A | S | F | K | V | G | F | K | V | I | K | K |
| 27 | LIG3-4(B65) | _{—} | _{—} | _{—} | _{—} | _{—} | K | _{—} | _{—} | _{—} | _{—} | _{—} | _{—} |
| 28 | LIG3-4(B70) | _{—} | _{—} | _{—} | _{—} | _{—} | P | _{—} | _{—} | _{—} | _{—} | _{—} | _{—} |
| 31 | LIG3-4(B75) | _{—} | _{—} | _{—} | _{—} | _{—} | K | _{—} | _{—} | _{—} | _{—} | _{—} | _{—} |
| 32 | LIG3-4(B76) | _{—} | _{—} | _{—} | _{—} | _{—} | K | _{—} | _{—} | _{—} | _{—} | _{—} | _{—} |
| 30 | LIG3-4(B73) | _{—} | _{—} | _{—} | _{—} | _{—} | K | _{—} | _{—} | _{—} | _{—} | _{—} | _{—} |
| 34 | LIG3-4(B82) | _{—} | C | _{—} | _{—} | _{—} | K | _{—} | _{—} | _{—} | _{—} | _{—} | _{—} |
| 33 | LIG3-4(B78) | _{—} | _{—} | _{—} | _{—} | _{—} | K | _{—} | _{—} | _{—} | _{—} | N | N |
| 18 | LIG3-4(B1) | _{—} | _{—} | _{—} | _{—} | _{—} | K | _{—} | _{—} | _{—} | _{—} | _{—} | _{—} |
| 15 | LIG3-4(15) | _{—} | _{—} | _{—} | _{—} | _{—} | _{—} | _{—} | _{—} | _{—} | _{—} | _{—} | _{—} |
| 38 | LIG3-4(D8) | _{—} | _{—} | _{—} | _{—} | _{—} | _{—} | _{—} | _{—} | _{—} | _{—} | _{—} | _{—} |
| 19 | LIG3-4(B15) | _{—} | _{—} | _{—} | _{—} | _{—} | K | _{—} | _{—} | _{—} | _{—} | _{—} | _{—} |
| 35 | LIG3-4(C1) | _{—} | _{—} | L | _{—} | _{—} | _{—} | _{—} | _{—} | _{—} | _{—} | N | N |
| 29 | LIG3-4(B71) | _{—} | _{—} | _{—} | _{—} | _{—} | P | _{—} | _{—} | _{—} | _{—} | _{—} | _{—} |
| 24 | LIG3-4(B39) | _{—} | _{—} | _{—} | _{—} | _{—} | P | _{—} | _{—} | _{—} | _{—} | N | N |
| 20 | LIG3-4(B16) | _{—} | _{—} | _{—} | _{—} | _{—} | _{—} | _{—} | _{—} | _{—} | _{—} | _{—} | _{—} |
| 37 | LIG3-4(D7) | _{—} | _{—} | _{—} | _{—} | _{—} | _{—} | _{—} | _{—} | _{—} | _{—} | _{—} | _{—} |
| 23 | LIG3-4(B38) | _{—} | _{—} | _{—} | _{—} | _{—} | P | _{—} | _{—} | _{—} | _{—} | _{—} | _{—} |
| 25 | LIG3-4(B40) | _{—} | _{—} | _{—} | _{—} | _{—} | K | _{—} | _{—} | _{—} | _{—} | _{—} | _{—} |
| 22 | LIG3-4(B36) | _{—} | _{—} | _{—} | _{—} | _{—} | K | _{—} | _{—} | _{—} | _{—} | _{—} | _{—} |
| 21 | LIG3-4(B24) | _{—} | _{—} | _{—} | _{—} | _{—} | _{—} | _{—} | _{—} | _{—} | _{—} | _{—} | _{—} |
| 26 | LIG3-4(B55) | _{—} | C | _{—} | _{—} | _{—} | K | _{—} | _{—} | _{—} | _{—} | _{—} | _{—} |
| 16 | LIG3-4(A4) | _{—} | _{—} | _{—} | _{—} | _{—} | _{—} | _{—} | _{—} | _{—} | V | _{—} | _{—} |
| 36 | LIG3-4(D5) | _{—} | _{—} | _{—} | _{—} | H | _{—} | _{—} | G | _{—} | _{—} | _{—} | _{—} |
| 14 | LIG3-4(7) | G | _{—} | _{—} | E | _{—} | _{—} | _{—} | _{—} | A | _{—} | _{—} | _{—} |
| 17 | LIG3-4(A6) | _{—} | _{—} | _{—} | _{—} | _{—} | _{—} | Y | _{—} | _{—} | _{—} | _{—} | _{—} |

### Example 7

### Meganuclease Protein Production in E. coli

[0826] In order to further confirm and quantify the activity of meganuclease variants, meganuclease protein was produced in E. coli and subjected to in vitro cutting assay on plasmid or corn genomic DNA containing the meganuclease recognition site. Total DNA was extracted from yeast strains harboring the meganuclease variants. The meganuclease coding sequence was PCR amplified and inserted in the expression vector pQE80 (QIAgen). The resulting plasmid was transformed into E. coli strain BL21 (Stratagene) with growth on LB media containing 100 ppm carbenicillin. A suspension of cells was prepared from the solid media and used to inoculate a 50 ml culture of 2xYT media containing 100 ppm carbenicillin at an optical density of 0.2. The cultures were grown at 37 degrees. When the optical density reached 0.8, protein expression was induced by addition of IPTG. The temperature was adjusted to 20 degrees, and the culture was grown for an additional 2 hours. E. coli cells were harvested by centrifugation, resuspended in Buffer 1 (50 mM Tris pH8, 500 mM NaCl, 10 mM imidizole) and lysed by sonication. Cell debris was removed by centrifugation. The supernatant was transferred to a disposable column loaded with 0.5 ml Nickel-NTA Superflow resin (QIAgen). The column was washed with 4 ml Buffer 2 (50 mM Tris pH8, 500 mM NaCl, 60 mM imidizole). Purified meganuclease protein was eluted with 0.6 ml Buffer 4 (50 mM Tris pH8, 500 mM NaCl, 400 mM imidizole). The meganuclease protein was transferred to a Vivaspin500 concentrator. Buffer exchange and concentration with SAB buffer (25 mM Tris pH8, 100 mM NaCl, 10 mM MgCl₂, 5 mM EDTA) containing 50% glycerol, 0.5 mM dithiothreitol was preformed. A final volume of approximately 0.1 ml of purified meganuclease protein solution was recovered. Bovine serum albumin was added to a final concentration of 100 microgram per milliliter.

### Example 8

### In Vitro Assay for Meganuclease Activity

[0827] Meganuclease protein was isolated as described in Example 7. Protein concentration was determined visually on Nu-PAGE gels (Life Technologies) by calculating and then comparing band intensity with serially diluted samples of known concentration. DNA concentration was determined using a Hoechst dye fluorometric assay. Time-course digestions were carried out on plasmid DNA containing the meganuclease recognition site at 37° C., 28° C., and 23° C. with 25 nM of purified meganuclease protein and 0.25 nM of linearized plasmid substrate in digestion buffer (100 mM Tris-HCl (pH 7.9)/100 mM NaCl/10 mM MgCl₂/1 mM DTT/5 mM EDTA) in a final volume of 80 ul. 20 μl time-points were taken at 0, 25, 50, and 75 minutes and stopped with an equal volume of stop buffer (100 mM Tris-HCl, pH 8.0/600 mM NaCl/2% SDS/100 mM EDTA/1 mg of proteinase K per ml), incubated at 50° C. for 30-45 minutes, and purified with a Qiagen PCR purification column per the manufacturer's instruction. To quantify the % digestion of each sample or loss of meganuclease recognition sites, real-time PCR was performed on 1 μl of purified plasmid DNA diluted 50-fold in water with a TaqMan assay spanning the meganuclease recognition site. The loss of meganuclease recognition sites was calculated via the ΔΔCt method relative to an internal control TaqMan assay. The 0 minute timepoint or mock control was used as the calibrator. Timed digestions were carried out on genomic DNA at 37° C., 28° C., and 23° C. with 6.07 ug of corn genomic DNA and 16 nM of purified meganuclease protein in a final volume of 80 ul. After 50 minutes, digestion reactions were stopped as described above and purified by phenol/chloroform extraction and ethanol precipitated in the presence of 0.2M NaCl. Precipitated genomic DNA was washed twice with 70% ethanol, dried, and resuspended in 34 μl of water. The percent digestion of each sample was quantified by real-time PCR as described above for plasmid substrate except 1 μl of undiluted genomic DNA was assayed by real-time PCR. Since the cleavage activity of the I-CreI endonuclease has been demonstrated to be sensitive to temperatures below 37° C. (Wang, J., Kim, H., Yuan, X. and Herrin, D. (1997) Nucleic Acids Res. 25, 3767-3776.), in vitro assays to assess cleavage activity of the I-CreI derived parental meganuclease and its variants were carried out at 37° C., 28° C., and 23° C.

### In-Vitro Meganuclease Activity of LIG3-4 and LIG3-4 Variants

[0828] On plasmid DNA containing the LIG3-4 recognition site, LIG3-4(B65) was the most active variant sustaining cleavage activity at 23° C. while little if any cleavage was detected for LIG3-4 and only slight cleavage was detected for LIG3-4(7) and LIG3-4(15) (FIG. 6A). At 28° C., hit15 and hit 7 achieved 66% and 50% cleavage, respectively, after 75 minutes while only slight cleavage was detected for LIG3-4 (FIG. 6B). At 37° C., hit7 demonstrated cleavage activity similar to LIG3-4 while hit15 and B65 cleaved the plasmid substrate more rapidly and to a greater extent (FIG. 6C). Based on plasmid DNA cleavage, all of the shuffled variants were more active than LIG3-4 with B65 being the most active variant followed in activity by hit15 and then hit7. These data closely mimicked the observations in the yeast assay.

[0829] The activity ranking established on plasmid DNA was conserved when genomic DNA cleavage was monitored. At 23° C., B65 maintained significant activity, cleaving 69% of its genomic substrate (FIG. 7A). At 28° C., no cleavage activity was detected for LIG3-4 while B65, hit15 and hit7 obtained 94%, 33% and 24% cleavage, respectively (FIG. 7B). At 37° C., LIG3-4 exhibited 47% cleavage at the LIG3-4 genomic recognition site while B65, hit15 and hit7 achieved 99%, 92% and 76% cleavage, respectively (FIG. 7C). Again, the data from in vitro cutting of maize genomic DNA were consistent with observations in the yeast assay.

### Example 9

### Analysis of Meganuclease Activity of LIG3-4 Variants in Maize

[0830] LIG3-4 variants were created as described in Example 3 and introduced in maize by particle gun transformation and Agrobacterium-mediated transformation.

[0831] Three LIG3-4 variants, LIG3-4 (B65) (SEQ ID NO:27), LIG3-4(15) (SEQ ID NOs:15) and LIG3-4(7) (SEQ ID NO:14) showed an increased meganuclease activity in yeast (Example 3) and an increased activity in the in vitro assay (Example 8, FIGS. 6A-6C; FIGS. 7A-7C) and were further tested in-vivo for their activity in maize.

[0832] A. Vector Construction for Plant Expression Vectors of the Meganuclease Genes and Repair (donor) DNAs for Transgene Integration by Homologous Recombination

[0833] Genes encoding the meganucleases were codon optimized for expression in maize using standard molecular biology techniques. The resulting plant-optimized nucleotide sequences were also supplemented with DNA sequences encoding a SV40 nuclear localization signal (SEQ ID NO: 72) and further modified by addition of the potato ST-LS1 intron to the coding sequence of the first monomer in order to eliminate its expression in E. coli and Agrobacterium. The resulting LIG3-4 variants, LIG3-4(7) (SEQ ID NO: 73), LIG3-4(15) (SEQ ID NO:74) and LIG3-4 (B65) (SEQ ID NO:75) were further tested for their activity in maize (in vivo).

[0834] Vectors comprising expression cassettes for the appropriate meganuclease were constructed using standard molecular biological techniques. For each of the meganucleases, a plant expression vector comprising a polynucleotide encoding one of the meganuclease genes was operably linked to a maize constitutive promoter.

[0835] To achieve site-specific DNA insertions, a repair DNA (donor DNA) containing the gene of interest has to be simultaneously present in the cell in addition to the recognition site and the meganuclease. A vector PHP46961 (SEQ ID NO: 76) containing a polynucleotide encoding the engineered meganuclease variant LIG3-4(15), and a donor DNA were constructed using standard molecular biology techniques. Similar vectors PHP46949 or PHP47257 were constructed containing the LIG3-4B(65) or LIG3-4(17), meganuclease respectively. The donor DNA contained an herbicide resistance gene (MoPAT, encoding a phosphinothricin acetyltransferase), used as the selection marker for transformation, and was flanked by two homologous recombination fragments, LIG3-4HR1 (SEQ ID NO: 77) and LIG3-4HR2 (SEQ ID NO: 78), which were about 1 kb long genomic DNA sequences flanking the meganuclease recognition sites. A vector containing LIG3-4 (PHP43914, produced as described for PHP46961) was also included as control.

[0836] The LIG3-4 variants' expression cassettes were also co-integrated into LBA4404 for Agrobacteria delivery. Vector names were PHP47331 for LIG3-4(B65), PHP47332 for LIG3-4 (15) and PHP47517 for LIG3-4(7), respectively.

[0837] Maize immature embryos 9-12 DAP (days after pollination, approximately 1.5-2.0 mm in size) from a maize transformable line were used for gene transformation by bombardment (Example 1 and Example 2). The immature embryos were placed on 560Y medium for 4 hours at 26° C. or alternatively, immature embryos were incubated at temperatures ranging from 26° C. to 37° C. for 8 to 24 hours prior to placing on 560Y preceding bombardment. Developmental genes ODP2 (AP2 domain transcription factor ODP2 (Ovule development protein 2); US20090328252 A1) and Wushel were included in the experiments through co-bombardment (Example 2). Maize immature embryos were transformed with the vectors PHP43914, PHP46949, PHP46961, and PHP47257.

[0838] Maize immature embryos 9-12 DAP (days after pollination, approximately 1.5-2.0 mm in size) from a maize transformable line were used for gene transformation by Agrobacterium. No developmental genes ODP2 or Wushel were included in the infection. Maize immature embryos were transformed with vectors of PHP47731, PHP47732, and PHP47517.

[0839] B. Meganuclease Activity of LIG3-4 Variants in Maize

[0840] To examine whether the LIG3-4 variants showed increased meganuclease activity in maize when compared to LIG3-4 about 2000 maize immature embryos were bombarded with plasmid DNA comprising each variant or control. Following bombardment, embryos were incubated on 560P (maintenance medium) at 28° C., then selected on bialophos herbicide. Successful delivery of LIG3-4 and the LIG3-4 variant donor vectors (PHP43914, PHP46949, PHP46961, and PHP47257) conferred bialaphos herbicide resistance, and was used to identify putative events by callus selection on herbicide containing media. Callus tissues and/or plants regenerated from stable transformants were screened for modification of the endogenous LIG3-4 recognition site.

[0841] Herbicide-resistant events were screened for modification at the meganuclease target site (comprising the recognition site) by measuring the target site copy-number using Real time PCR (qPCR). Two copies of the target site indicate that both alleles are wild type and that no modification occurred at the recognition site. If only one copy of the target site is detected by qPCR, this means that one allele of the target site has changed during repair of the double strand break generated by the LIG3-4 or its shuffle variants, while absence of the target site (null or 0) is the result of both alleles bring modified. The copy number can also be in between 1 and 2 due to chimeric nature of callus samples. The probe sequence for qPCR of LIG3-4 target site was ATACCTCACACGTACGCG (SEQ ID NO: 79), the LIG3-4_forward primer was GATTTACGCACCTGCTGGGA (SEQ ID NO: 80) and LIG3-4_reverse primer was CTGAGCTGTATTCCCGCGCA (SEQ ID NO:81) The amplicon was approximately 100 bp.

[0842] Transgenic events with a target site copy number of 0, 1, or between 1 and 2 were further analyzed for increased meganuclease activity. The meganuclease activity was determined by measuring the Target Site (TS) mutation rate. Target site mutation rate was defined as: (number of events with target site modification/total number events)*100%. The TS mutation rate for the LIG3-4 meganuclease was 6% (Table 4). The Event Recovery Rate (Table 4) is calculated using number of events recovered divided by total number of embryos bombarded, and may indicate if a meganuclease has some toxic effect or not. Table 4 shows the effect of different LIG3-4 variants after bombardment and 6-8 weeks antibiotic selection. The meganuclease variants LIG3-4 (7) and LIG3-4 (15) both yielded significantly higher mutation frequencies when compared to the parental LIG3-4 meganuclease, consistent with observations in the yeast assay and in vitro DNA cutting assays. LIG3-4(B65) also yielded higher mutation frequency than the parental LIG3-4, but not as high as the other LIG3-4 variants. This may be due to toxicity associated with this very active meganuclease as indicated by the event recovery rate of LIG3-4 (65).

TABLE 4
Activity of LIG3-4 and LIG3-4 variant meganucleases as determined
by target site mutation rate (TS mutation rate) in plant tissue
originated through gene bombardment transformation.

| Meganuclease | Event Recovery Rate | TS Mutation Rate | Insertion |
|---|---|---|---|
| LIG3-4 | 17% | 6% | Yes |
| LIG3-4(7) | 13% | 29% | Yes |
| LIG3-4(15) | 15% | 54% | Yes |
| LIG3-4(B65) | 3% | 21% | Yes |

TABLE 5
Activity of LIG3-4 and LIG3-4 variant meganucleases as determined
by target site mutation rate (TS mutation rate) in plant tissue
originated through Agrobacterium transformation.

| Meganuclease | Event Recovery Rate | Mutation Rate | Insertion |
|---|---|---|---|
| LIG3-4 | ~20% | 1-3% | No |
| LIG3-4 (7) | 19% | 15% | Yes |
| LIG3-4 (15) | 11% | 34% | Yes |
| LIG3-4 (B65) | 9% | 74% | Yes |

Table 5 indicates that all three variant meganucleases (LIG3-4 (7), LIG3-4(15) and LIG3-4(B65) showed an increased meganuclease activity (TS mutation rate of 15%, 34% and 74%, respectively) when compared to the control non variant LIG3-4 (TS mutation rate 1 to 3%). The highest increase in meganuclease activity was observed when plant tissue was generated through Agrobacterium transformation. (Table 5). These data are very consistent with data obtained in the yeast and in vitro cutting assays with these variants.

[0843] When the meganuclease and gene delivery constructs were introduced via Agrobacterium-mediated transformation, there was a much smaller reduction in the recovery of transgenic events (higher event recovery rate in Table 5 when compared to Table 4). This may be due to the fact that less DNA is delivered to the nuclei of the plant cells by this method.

Maize calli were also screened for integration of the transgene cassette from the donor DNA (PHP43914, PHP46949, PHP46961, PHP47257; agro of PHP47331, PHP47332, and PHP47517) at the LIG3-4 recognition site through junction PCR and selected callus events were regenerated into T0 plants (FIG. 8A-FIG. 8B). When integration occurred, e.g. the donor sequence was integrated at the recognition site, Insertion is designated as “Yes”. When no integration occurred, Insertion is designated as “no” (Table 4 and 5). Targeting of transgenes to the LIG3-4 locus was observed with each LIG3-4 variant delivered by particle bombardment (Table 4. When introduced via Agrobacterium-mediated transformation, each LIG34 variant enabled transgene integration at the target site, whereas the parental LIG34 did not (Insertion YES for variants, NO for LIG3-4; Table 5).

### Example 10

### Creation of MHP77 and MHP77.3 Variant Meganucleases

### A. MHP77 & MHP77.3 Meganucleases and MHP 77 Recognition Site

[0844] An endogenous maize genomic target site comprising the MHP77 recognition site (SEQ ID NO: 85) was selected for design of a custom double-strand break inducing agent. The MHP77 recognition site is a 22 bp polynucleotide located on chromosome 1 and having the following sequence:

(SEQ ID NO: 85)
GGGCGGTATGTATGTCATACTA

[0845] Wild type I-CreI meganuclease (SEQ ID NO: 3) was modified to produce two engineered meganucleases, MHP77 (SEQ ID NO: 86) and MHP77.3 (SEQ ID NO: 250), designed to recognize the MHP77 recognition sequence. The design of custom made meganucleases has been described in United States Patent Application Publication No. US 2007/0117128 A1.

### B. MHP77 and MHP77.3 Variant Meganucleases

[0846] Variants of the MHP77 meganuclease were created through gene shuffling methods in a manner similar to how the LIG3-4 variants were created and described in Example 3. This involved the introduction of amino acid modifications as found in naturally occurring meganuclease proteins and previously identified in LIG3-4 variants as well as random mutations. The shuffling process resulted in generation of MHP77 variants with recombination of amino acid modifications, unintended amino acid modifications due to mutagenic PCR, deletions, and insertions (SEQ ID NOs: 86-167)

[0847] Three variants of the MHP77.3 meganuclease were created by incorporating the same amino acid modifications (mutations) of MHP77(L9-02), MHP77(L9-11), or MHP77(L9-12), thus creating MHP77.3 (L9-02) (SEQ ID NO:251), MHP77.3 (L9-11) (SEQ ID NO:252), and MHP77.3(L9-12) (SEQ ID NO:253). MHP77.3 (15) (SEQ ID NO:262) contained the exact same nucleotide/amino acid modifications as described for LIG3-4 (15). The amino acid modifications were introduced into MHP77.3 through standard molecular biology techniques.

### C. MHP77 Variant Meganucleases Activity in Yeast

[0848] A total of 79 MHP77 variants with increased activity were confirmed in the yeast system (as described in Example 6). Increased activity was observed across a range of temperatures: 24° C., 28° C., 30° C. and 37 37° C., as shown in Table 6. A score of 0 indicates that no white sectors (no cutting indicating no meganuclease activity) were observed; a score of 4 indicates completely white colonies (complete cutting of the recognition site indicating high meganuclease activity); scores of 1-3 indicate intermediate white sectoring phenotypes (and intermediate degrees of recognition site cutting) was indicative of intermediate meganuclease activity.

TABLE 6
Activity of MHP77 variant Meganucleases in Yeast Screening
Strain assayed at different temperatures.

| #Variant | 24° C. | 28° C. | 30° C. | 37° C. |
|---|---|---|---|---|
| MHP77 | 0 | 0 | 0 | 0 |
| MHP77(L15-31) | X | 4 | 4 | 4 |
| MHP77(L16-11) | 4 | 4 | 4 | 4 |
| MHP77(L16-09) | 2.5 | 4 | 4 | 4 |
| MHP77(L16-04) | 2 | 4 | 4 | 4 |
| MHP77(L16-19) | 2 | 4 | 4 | 4 |
| MHP77(L16-17) | 3 | 3.5 | 4 | 4 |
| MHP77(L16-23) | 1 | 3.5 | 4 | 4 |
| MHP77(L15-34) | 1 | 3.5 | 4 | 4 |
| MHP77(L15-40) | 0.5 | 3.5 | 4 | 4 |
| MHP77(L15-39) | 0.5 | 3.5 | 4 | 4 |
| MHP77(L15-45) | 0.5 | 3 | 4 | 4 |
| MHP77(L15-29) | 0.5 | 2.5 | 4 | 4 |
| MHP77(L15-06) | 0 | 2 | 4 | 4 |
| MHP77(L16-08) | 1 | 3 | 3.5 | 4 |
| MHP77(L16-05) | 1 | 3 | 3.5 | 4 |
| MHP77(L16-02) | 0.5 | 2.5 | 3.5 | 4 |
| MHP77(L16-24) | 0 | 2.5 | 3.5 | 4 |
| MHP77(L16-21) | 0 | 2.5 | 3.5 | 4 |
| MHP77(L16-14) | 0 | 2.5 | 3.5 | 4 |
| MHP77(L16-18) | 0.5 | 2 | 3.5 | 4 |
| MHP77(L15-27) | 0 | 2 | 3.5 | 4 |
| MHP77(L9-02) | 0 | 2 | 3 | 4 |
| MHP77(L16-12) | 0 | 2 | 3 | 4 |
| MHP77(L16-01) | 0 | 2 | 3 | 4 |
| MHP77(L15-05) | 0 | 2 | 3 | 4 |
| MHP77(L15-24) | 0 | 2 | 3 | 4 |
| MHP77(L16-06) | 0 | 1 | 3 | 4 |
| MHP77(L16-15) | 0 | 1 | 3 | 4 |
| MHP77(L15-33) | 0 | 1 | 3 | 4 |
| MHP77(L16-03) | 0 | 2 | 2.5 | 4 |
| MHP77(L15-47) | 0 | 0 | 2.5 | 4 |
| MHP77(L15-46) | 0 | 0 | 2.5 | 4 |
| MHP77(L9-12) | 0 | 1 | 2 | 4 |
| MHP77(L16-16) | 0 | 1 | 2 | 4 |
| MHP77(L15-10) | 0 | 1 | 2 | 4 |
| MHP77(L9-03) | 0 | 0.5 | 2 | 4 |
| MHP77(L15-20) | 0 | 0.5 | 2 | 4 |
| MHP77(L15-28) | 0 | 0 | 2 | 4 |
| MHP77(L15-21) | 0 | 0 | 2 | 4 |
| MHP77(L15-13) | 0 | 0 | 2 | 4 |
| MHP77(L9-04) | 0 | 0 | 1 | 4 |
| MHP77(L15-18) | 0 | 0 | 1 | 4 |
| MHP77(L18-01) | X | 0 | 0 | 4 |
| MHP77(L17-12) | X | 0 | 0 | 4 |
| MHP77(L17-01) | X | 0 | 0 | 4 |
| MHP77(L15-03) | 0 | 0.5 | 2 | 3.5 |
| MHP77(L15-11) | 0 | 0.5 | 1 | 3.5 |
| MHP77(L18-12) | X | 0 | 1 | 3.5 |
| MHP77(L15-15) | 0 | 0 | 1 | 3.5 |
| MHP77(L15-12) | 0 | 0 | 1 | 3.5 |
| MHP77(L9-1)* | 0 | 1 | 2 | 3 |
| MHP77(L9-9) | 0 | 0 | 1 | 3 |
| MHP77(L9-11) | 0 | 0 | 1 | 3 |
| MHP77(L9-10) | 0 | 0 | 1 | 3 |
| MHP77(L15-02) | 0 | 0 | 1 | 3 |
| MHP77(L15-08) | 0 | 0 | 0.5 | 3 |
| MHP77(L16-07) | 0 | 0 | 0 | 3 |
| MHP77(L15-35) | 0 | 0 | 0 | 2.5 |
| MHP77(L13-12) | 0 | 0 | 0 | 2.5 |
| MHP77(L113-01) | 0 | 0 | 0 | 2.5 |
| MHP77(L9-06) | 0 | 0.5 | 0.5 | 2 |
| MHP77(L15-42) | 0 | 0 | 0 | 2 |
| MHP77(L15-41) | 0 | 0 | 0 | 2 |
| MHP77(L15-36) | 0 | 0 | 0 | 2 |
| MHP77(L15-30) | 0 | 0 | 0 | 2 |
| MHP77(L112-03a) | 0 | 0 | 0 | 2 |
| MHP77(L73-02a) | 0 | 0 | 0 | 1.5 |
| MHP77(L13-10B1) | 0 | 0 | 0 | 1.5 |
| MHP77(L72-08a) | X | 0 | 0 | 1 |
| MHP77(L72-09a) | 0 | 0 | 0 | 1 |
| MHP77(L72-01a) | 0 | 0 | 0 | 1 |
| MHP77(L13-08a) | 0 | 0 | 0 | 1 |
| MHP77(L13-06) | 0 | 0 | 0 | 1 |
| MHP77(L13-02) | 0 | 0 | 0 | 1 |
| MHP77(L13-01a) | 0 | 0 | 0 | 1 |
| MHP77(L73-05a) | 0 | 0 | 0 | 0.5 |
| MHP77(L15-43) | 0 | 0 | 0 | 0.5 |
| MHP77(L13-04) | 0 | 0 | 0 | 0.5 |
| MHP77(L13-11) | 0 | 0 | 0 | 0.5 |
| MHP77(L15-23) | 0 | 0 | 0 | 0 |
| MHP77(L15-16) | 0 | 0 | 0 | 0 |

Large increases in meganuclease activity (high scores) were observed. Complete cutting of the recognition site was observed with some variants even at the low temperature of 22° C. (see MHP77(L16-11) Table 6).
FIG. 9A-FIG. 9N show the amino acid modifications of MHP77 variants relative to the MHP77 parental meganuclease. A (−) indicates that the amino acid is identical to the MHP77 reference sequence.

### Example 11

### Analysis of MHP77 and MHP77.3 Meganuclease Variants in Maize

[0849] Genes encoding the MHP77 and MHP77.3 engineered meganucleases (Example 10) were optimized for expression in plants. The engineered meganuclease expression cassettes contained the maize codon-optimized nucleotide sequences for better performance in maize cells. The meganuclease gene sequences were also supplemented with DNA sequences encoding a SV40 nuclear localization signal resulting in the plant optimized sequence of SEQ ID NO: 254 for MHP77 and SEQ ID NO:255 for MHP77.3. The maize ubiquitin promoter and the potato proteinase inhibitor II gene terminator sequences completed the endonuclease gene designs.

[0850] The plant optimized nucleotide sequence for the MHP77 and MHP77.3 variants were MHP77(L9-02) (SEQ ID NO:256), MHP77(L9-11) (SEQ ID NO:257), MHP77(L9-12) (SEQ ID NO:258), MHP77.3 (L9-02) (SEQ ID NO:259, MHP77.3 (L9-11) (SEQ ID NO:260), and MHP77.3(L9-12) (SEQ ID NO:261) and MHP77(15) (SEQ ID NO:263).

### A. Vector Construction for Plant Expression Vectors of the Meganuclease Genes and Repair (Donor) DNAs for Transgene Integration by Homologous Recombination

[0851] Vectors comprising expression cassettes for the appropriate meganuclease were constructed using standard molecular biological techniques. For each of the meganucleases, a plant expression vector comprising a polynucleotide encoding one of the meganuclease genes was operably linked to a maize constitutive promoter.

[0852] To achieve site-specific DNA insertions, a repair DNA (donor DNA) containing the gene of interest has to be simultaneously present in the cell in addition to the recognition site and the meganuclease. Vectors similar to PHP46961 (SEQ ID NO:76) described in Example 9, but containing a polynucleotide encoding the meganuclease variant MHP77(L9-11), MHP77(L9-12), MHP77(L9-02), MHP77.3(L9-11), MHP77.3(L9-12), MHP77.3(L9-02), or MHP77.3(15); and a donor DNA were constructed using standard molecular biology techniques. These vectors were referred to as PHP53132, PHP53134, PHP53136, PHP53133, PHP53135, PHP53137 and PHP50239. The donor DNA contained an herbicide resistance gene used as the selection marker for transformation. The herbicide resistance gene MoPAT encodes a phosphinothricin acetyltransferase, and was flanked by two homologous recombination fragments, MHP77HR1 (SEQ ID NO:264) and MHP77HR2 (SEQ ID NO: 265), which were about 1 kb long genomic DNA sequences flanking the meganuclease recognition sites.

[0853] Maize immature embryos 9-12 DAP (days after pollination, approximately 1.5-2.0 mm in size) from a maize transformable line were used for gene transformation by bombardment (Example 1 and Example 2). The immature embryos were placed on 560Y medium for 4 hours at 26° C. or alternatively, immature embryos were incubated at temperatures ranging from 26° C. to 37° C. for 8 to 24 hours prior to placing on 560Y preceding bombardment. Developmental genes ODP2 (AP2 domain transcription factor ODP2 (Ovule development protein 2); US20090328252 A1) and Wushel were included in the experiments through co-bombardment (Example 2). Maize immature embryos were transformed with the vectors PHP53132, PHP53134, PHP53136, PHP53133, PHP53135, PHP53137, and PHP50239.

### B. Meganuclease Activity of MHP77 and MHP77.3 Variants in Maize

[0854] To examine whether the MHP77 and MHP77.3 meganuclease variants increased meganuclease activity when compared to MHP77 or MHP77.3, about 2000 maize immature embryos were bombarded with plasmid DNA of each variant and control. Following bombardment, embryos were incubated on 560P (maintenance medium) at 28° C., then selected on Herbicide (bialophos). Successful delivery of the MHP77, MHP77.3 variants donor vectors (PHP45970, PHP50238, PHP53132, PHP53134, PHP53136, PHP53133, PHP53135, PHP53137, or PHP50239) conferred bialaphos herbicide resistance, and was used to identify putative events by callus selection on herbicide containing media. Callus tissues and/or plants regenerated from stable transformants using standard culture and regeneration conditions were screened for modification of the endogenous MHP77 recognition site.

[0855] Herbicide-resistant events were screened for modification at the target site (comprising the MHP77 recognition site) by measuring target site copy-number using qPCR as described in Example 9. The probe sequence for qPCR of MHP77 target site was ACTAATTCAAGTGATGGACAAA (SEQ ID NO: 266), the MHP77 forward primer was TCCTTAGGGCGGTATGTATGTCA (SEQ ID NO: 267) and MHP77 reverse primer was CATCGGTCAAAAAACACATAAACTTT (SEQ ID NO: 268). The amplicon was approximately 100 bp.

[0856] Target site mutation rate (TS mutation rate, Table 7) indirectly measures the meganuclease activity. Table 7 shows the effect of different shuffle variants of MHP77 and shuffle meganuclease after bombardment and 6-8 weeks antibiotic selection. Table 7 indicates that all the three shuffled variants of MHP77 meganucleases are more active when compared to MHP77 meganuclease. Increased activity of shuffled MHP77 meganuclease also resulted in a reduction of the event recovery when compared to the MHP77 (control).

TABLE 7
Activity of MHP77 and MHP77 variant meganucleases as determined
by target site mutation rate (TS mutation rate) in plant tissue
originated through gene bombardment transformation.

| Meganuclease | Event Recovery Rate | TS Mutation Rate | Insertion |
|---|---|---|---|
| MHP77 (control) | 21% | 1% | no |
| MHP77L9-11 | 11% | 4% | no |
| MHP77L9-12 | 9% | 17% | yes |
| MHP77L9-02 | 3% | 6% | no |

TABLE 8
Activity of MHP77.3 and MHP77.3 variant meganucleases as determined
by target site mutation rate (TS mutation rate) in plant tissue
originated through Agrobacterium transformation.

| Meganuclease | Transformation rate | Mutation Rate | Insertion |
|---|---|---|---|
| MHP77.3 | 14% | 11% | no |
| MHP77.3(15) | 13% | 22% | yes |
| MHP77.3L9-11 | 9% | 35% | yes |
| MHP77.3L9-12 | 3% | 19% | yes |
| MHP77.3L9-02 | 2% | 5% | no |

[0857] Table 8 indicates that all the four shuffled variants of MHP77.3 meganucleases are more active when compared to the non variant MHP77.3 meganuclease. Increased activity of some but not all shuffled MHP77 meganuclease resulted in a reduction of the event recovery when compared to the MHP77.

[0858] Maize calli were also screened for integration of the transgene cassette from the donor DNA vector (PHP45970, PHP50238, PHP53132, PHP53134, PHP53136, PHP53133, PHP53135, PHP53137, and PHP50239) at the MHP77 recognition site through junction PCR and selected callus events were regenerated into T0 plants. When integration occurred, e.g. the donor sequence was integrated at the recognition site. Insertion (Table 7 and 8) is designated as “Yes”. When no integration occurred, Insertion is designated as “no”.

### Example 12

### Creation of MS26 Variant Meganucleases

### A. MS26+ & MS26++ Meganucleases and MS26 Recognition Site

[0859] An endogenous maize genomic target site comprising the MS26 recognition site (SEQ ID NO: 269) was selected for design of a custom double-strand break inducing agent. The MHP26 recognition site is a 22 bp polynucleotide and having the following sequence:

(SEQ ID NO: 269)
gatggtgacgtacgtgccctac

[0860] Wild type I-CreI meganuclease (SEQ ID NO: 3) was modified to produce two engineered meganucleases, MHP26+ (SEQ ID NO: 270) and MHP26++ (SEQ ID NO: 271), designed to recognize the MHP26 recognition sequence. The design of custom made meganucleases has been described in United States Patent Application Publication No. US 2007/0117128 A1.

### B. MS26 Variant Meganucleases

[0861] As described in Example 6 and 9, LIG3-4 variants were introduced into yeast and maize and demonstrated significantly higher meganuclease activity when compared to the non-variant LIG3-4 meganuclease. These LIG3-4 variants were characterized with specific amino acid modifications when compared to the parental LIG3-4 (Table 2 and FIG. 5A-5E). To test if these amino acid modification (and respective nucleotide modifications) can also increase the activity of a MS26+ meganuclease, the exact same nucleotide/amino acid modifications as described for LIG3-4 (7), LIG3-4 (15), and Lig3-4(B65) were introduced into MS26+ through standard molecular biology techniques, resulting in the following three MS26+ variants: MS26+ (7) (SEQ ID NO: 272), MS26+ (15) (SEQ ID NO:273), and MS26 (B65) (SEQ ID NO: 274) variants.

[0862] Similarly, the MS26++ nucleotide/amino acid sequence was optimized to include the nucleotide/amino acid modifications of LIG3-4 (15) resulting in MS26++(15) meganuclease variant (SEQ ID NO: 275).

### Example 13

### Analysis of Meganuclease Activity of MS26+ and MS26++ Variants in Maize

[0863] Genes encoding the MHP26+ and MHP26++ engineered meganucleases were optimized for expression in plants. The engineered meganuclease expression cassettes contained the maize codon-optimized nucleotide sequences for better performance in maize cells. The meganuclease gene sequences were also supplemented with DNA sequences encoding a SV40 nuclear localization signal (SEQ ID NO: 34) resulting in the plant optimized sequence of SEQ ID NO: 276 for MHP26+ and SEQ ID NO:279 for MS26++. The maize ubiquitin promoter and the potato proteinase inhibitor II gene terminator sequences completed the endonuclease gene designs. Plant optimized sequences for MS26+ and MS26++ variant meganucleases are SEQ ID NO: 419, 277-279 and SEQ ID NO:280, respectively.

### A. Vector Construction for Plant Expression Vectors of the Meganuclease Genes and Repair (Donor) DNAs for Transgene Integration by Homologous Recombination

[0864] Coding parts of the MS26+ variants were introduced into the test vector PHP51583 containing a slot for meganuclease driven by ubiquitin promoter, a fusion of two marker genes, MoPAT and DsRed, also under the control of ubiquitin promoter, and kanamicyn resistance gene.

[0865] The resulting constructs were delivered into the scutellum cells of maize immature embryos via microprojectile bombardment as described in Example 1. Developmental genes (BBM and WUS) were also delivered by co-bombarded (Example 1 and 2).

### B. Meganuclease Activity of MS26+ Variants in Maize

[0866] Callus tissue of transgenic events was collected, total genomic DNA was extracted and used as a template to amplify DNA fragment of about 1 kb comprising the Ms26 recognition site. Frequencies of mutations of the MS26 recognition site (Target site mutation rate) were estimated by the fragments digestion with BsiWI restriction nuclease which cuts the intended Ms26 recognition site. Frequency of mutations was calculated based on the percentage of remaining (uncut) fragment indicating mutations at the target site. Events with at least 50% of undigested fragment were indicative of at least one allel being cut in first stages of development and thus were indicative of mutations. Unlike in the case of LIG3-4 (Example 9), no decrease in frequency of event recovery of the MS26+ variants was observed when compared to the parental MS26+. All three MS26+ variants yielded higher mutation frequencies compared with Ms26+ meganuclease (Table 9). While Ms26+(B65) and Ms26+(7) demonstrated moderate increase in meganuclease activity (3 and 4 fold increase, respectively), Ms26+(15) demonstrated approximately a 10 fold increase of activity (Table 9).

TABLE 9
Activity of MS26+ and MS26+ variant meganucleases as determined
by target site mutation rate (TS mutation rate) in plant tissue.

| | Number of | TS Mutation |
|---|---|---|
| Meganuclease | events analyzed | Rate |
| MS26+ | 282 | 2% |
| MS26+ (7) | 191 | 9% |
| MS26+ (15) | 227 | 25% |
| MS26+ (B65) | 176 | 7% |

Introducing the same amino acid modifications (mutations) as LIG3-4 (15) into MS26++ (15) resulted in a dramatic increase of meganuclease activity as measured by the % mutation rate of MS26++ (44%) when compared to MS26 (7%) (Table 10). This data indicates that nearly half of all events analyzed carried mutations at the Ms26 recognition site.

TABLE 10
Activity of MS26+ and MS26+ variant meganucleases as determined
by target site mutation rate (TS mutation rate) in plant tissue.

| | Number of | TS Mutation |
|---|---|---|
| Meganuclease | events analyzed | Rate |
| MS26++ | 189 | 7% |
| MS26+ (15) | 185 | 44% |

### Example 14

### Creation of MHP and MHP14+ Variant Meganucleases

### A. MHP14 & MHP14+ Meganucleases and MHP14 Recognition Site

[0867] An endogenous maize genomic target site comprising the MHP14 recognition site (SEQ ID NO: 281) was selected for design of a custom double-strand break inducing agent. The MHP14 recognition site is a 22 bp polynucleotide located and having the following sequence:

(SEQ ID NO: 281)
caaacagattcacgtcagattt

[0868] Wild type I-CreI meganuclease was modified to produce the engineered meganucleases MHP14 (SEQ ID NO: 282) and MHP14+ (SEQ ID NO: 283) designed to recognize the MHP14 recognition sequence. The design of custom made meganucleases has been described in United States Patent Application Publication No. US 2007/0117128 A1.

### B. MHP14 and MHP14+ Variant Meganucleases

[0869] Variants of the MHP14 meganuclease were created through gene shuffling methods in a manner similar to how the LIG3-4 variants were created and described in Example 3. This involved the introduction of amino acid modifications as found in naturally occurring meganuclease proteins and previously identified in LIG3-4 variants as well as random mutation. The shuffling process resulted in generation of MHP14 variants with recombination of amino acid modifications, unintended amino acid modifications due to mutagenic PCR, deletions, and insertions (SEQ ID NOs: 284-298) Corresponding DNA sequences are SEQ ID NO:300-314.

[0870] Mutations from five MHP14 variants, MHP14 (04), MHP14 (06), MHP14 (08), MHP14 (12) and MHP14 (14), were introduced into MHP14+, resulting in MHP14+(04) (SEQ ID NO: 315), MHP14+(06) (SEQ ID NO: 316), MHP14+(08) (SEQ ID NO: 317), MHP14+(12) (SEQ ID NO: 318), MHP14+(14) (SEQ ID NO: 319), respectively. One additional variant was generated by introduction of the G19S mutation from LIG3-4 (15) into MHP14+, resulting in MHP14+(15) (SEQ ID NO: 320). These mutations were introduced into MHP14+ through standard molecular biology techniques.

### Example 15

### Analysis of Meganuclease Activity of MHP14 and MHP14+ Variants in Yeast and Maize

[0871] A total of 15 MHP14 variants with increased activity were confirmed in the yeast system (as described in Example 6). Increased activity was observed across a range of temperatures: 28 degrees Celsius, 34 degrees Celsius and 37 degrees Celsius, as shown in Table 11.

TABLE 11
Activity of MHP14 variant meganucleases in yeast Screening
Strain assayed at different temperatures.

| meganuclease | 28° C. | 34° C. | 37° C. |
|---|---|---|---|
| MHP14 | 0 | 2 | 2 |
| MHP14(L14-07) | 0.5 | | 4 |
| MHP14(01) | 0 | 3 | 3 |
| MHP14(06) | 0 | 3.5 | 3.5 |
| MHP14(L14-04) | 0 | | 3 |
| MHP14(08) | 1 | 4 | 4 |
| MHP14(07) | 0.5 | 2.5 | 2.5 |
| MHP14(03) | 0.5 | 3 | 3 |
| MHP14(04) | 2 | x | x |
| MHP14(02) | 2 | 4 | 4 |
| MHP14(13) | 1 | 4 | 3.5 |
| MHP14(L14-03) | 0 | | 3 |
| MHP14(14) | 1 | 4 | 4 |
| MHP14(09) | 2 | 4 | 4 |
| MHP14(12) | 1.5 | 4 | 4 |
| MHP14(10) | 1 | 4 | 4 |

Large increases in meganucleaseactivity (high scores) were observed.
FIG. 10A-FIG. 10D show the amino acid modifications of MHP14 variant meganucleases relative to the MHP14 parental meganuclease. A (−) indicates that the amino acid is identical to MHP14.

[0872] Results from activity screening of five MHP14+ variants are shown in Table 12.

TABLE 12
Activity of MHP14+ variant meganucleases in yeast
Screening Strain assayed at different temperatures.

| Meganuclease | 28° C. | 37° C. |
|---|---|---|
| MHP14 | 0 | 2 |
| MHP14+ (04) | 2 | X |
| MHP14+ (06) | 0 | 4 |
| MHP14+ (08) | 1 | 4 |
| MHP14+ (12) | 2 | 4 |
| MHP14+ (14) | 1 | 4 |
| MHP14+ (15) | — | — |

[0873] All MHP14+ variants showed higher activity in the Yeast Assay screened at 37 C when compared to the MHP14 meganuclease (Table 12). Variant MHP14+(04), MHP14+ (08), MHP14+ (12) and MHP14+ (14) showed increased activity even when assayed at lower temperatures temperature of 28° C. (Table 12.)

[0874] Genes encoding the MHP14 and MHP14+ variant meganucleases were optimized for expression in plants. The engineered meganuclease expression cassettes contained the maize codon-optimized nucleotide sequences for better performance in maize cells. The meganuclease gene sequences were also supplemented with DNA sequences encoding a SV40 nuclear localization resulting in the plant optimized sequences of SEQ ID NOs: 321-327. The maize ubiquitin promoter and the potato proteinase inhibitor II gene terminator sequences completed the endonuclease gene designs.

[0875] Testing and analysis of meganuclease activity of the MHP14+ variants in-planta was performed as described for Ms26+ and Ms26++ variants (Example 12) and results are shown in Table 13.

TABLE 13
Activity of MHP14 and MHP14+ variant meganucleases
in maize as determined by target site mutation
rate (TS mutation rate) in plant tissue.

| | Number of | TS Mutation |
|---|---|---|
| Meganuclease | events analyzed | Rate |
| MHP14 | 192 | 13% |
| MHP14+ (04) | 192 | 38% |
| MHP14+ (06) | 192 | 7% |
| MHP14+ (08) | 192 | 25% |
| MHP14+ (12) | 192 | 47% |
| MHP14+ (14) | 192 | 39% |
| MHP14+ (15) | 192 | 20% |

Two variants, MHP14+ (04) and MHP14+ (08), while demonstrating higher activity also showed rather high levels of toxicity. MHP14+06 showed no difference in both toxicity and activity when compared to MHP14. Two variants, MHP14+ (12) and MHP14+ (14), demonstrated high levels of activity without increased toxicity. MHP14+ (15) variant showed moderate increase of activity and no increase of toxicity (Table 13).

### Example 16

### DNA Shuffling to Create Variants of MP107 Meganuclease

[0876] An endogenous maize genomic target site comprising the MP107 recognition sequence (SEQ ID NO:328) was selected for design of a custom double-strand break inducing agent. The MP107 recognition site is a 22 bp polynucleotide having the following sequence:

(SEQ ID NO: 328)
ctagtatacgtgagagaccttg.

[0877] An engineered MP107 meganuclease (SEQ ID NO: 329) was produced as described in Example 3.

[0878] The first phase of MP107 meganuclease optimization was designed to introduce amino acid modifications into the MP107 meganuclease as described in Example 3. Libraries were based on introduction of mutations previously identified in LIG3-4, MHP14 and MHP77 variants with increased activity.

[0879] The shuffling process resulted in generation of variants with recombination of amino acid modifications, unintended amino acid modifications due to mutagenic PCR, deletions, and insertions (SEQ ID NOs: 330-341). Corresponding nucleotide sequences are shown in SEQ ID NOs:343-354.

[0880] A total of 6 MHP107 variants with increased activity were confirmed in the yeast system (as described in Example 6). Increased activity was observed across a range of temperatures: 28 degrees Celsius, 30 degrees Celsius and 37 degrees Celsius, as shown in Table 14.

TABLE 14
Activity of MP107 variant Meganucleases in Yeast Screening
Strain assayed at different temperatures.

| meganuclease | 28° C. | 30° C. | 37° C. |
|---|---|---|---|
| MHP107 | 0 | 0 | 0 |
| MHP107(D1) | 0 | 0 | 0 |
| MHP107(D5) | | 0.5 | 1.5 |
| MHP107(D3) | | 0.5 | 2 |
| MHP107(D2) | | 0 | 0 |
| MHP107(C6) | 0.5 | 1 | 3 |
| MHP107(C4) | | 0 | 0 |
| MHP107(D4) | | 0 | 2 |
| MHP107(C5) | | 0 | 1 |
| MHP107(C1) | 2 | 3 | 4 |
| MHP107(C2) | | 0 | 0 |
| MHP107(D6) | 0 | 0 | 0 |
| MHP107(C3) | | 0 | 0 |

[0881] FIG. 11 show the amino acid modifications of MP107 variants relative to the MP107 parental meganuclease. A (−) indicates that the amino acid is identical to MP107.

### Example 17

### DNA Shuffling to Create Variants of Zm6.3 Meganuclease

[0882] An endogenous maize genomic target site comprising the Zm6.3 recognition sequence (SEQ ID NO:355) was selected for design of a custom double-strand break inducing agent. The Zm6.3 recognition site is a 22 bp polynucleotide having the following sequence: caggctctcgtaaatgcgcctg (SEQ ID NO:355).

[0883] An engineered Zm6.3 meganuclease (SEQ ID NO:356)) was produced as described in Example 3.

[0884] The first phase of Zm6.3 meganuclease optimization was designed to introduce amino acid modifications into the Zm6.3 meganuclease as described in Example 3. Libraries were based on introduction of mutations previously identified in LIG3-4, MHP14 and MHP77 variants with increased activity.

[0885] The shuffling process resulted in generation of variants with recombination of amino acid modifications, unintended amino acid modifications due to mutagenic PCR, deletions, and insertions (SEQ ID NOs: 357-371). Corresponding nucleotide sequences are shown in SEQ ID NOs:373-387.

[0886] A total of 15 Zm6.3 variants with increased activity were confirmed in the yeast system (as described in Example 6). Increased activity was observed across a range of temperatures: 28 degrees Celsius, 30 degrees Celsius and 37 degrees Celsius, as shown in Table 15.

TABLE 15
Activity of Zm6.3 variant Meganucleases in Yeast Screening
Strain assayed at different temperatures.

| meganuclease | 28° C. | 30° C. | 37° C. |
|---|---|---|---|
| ZM6.3 | 0 | 0.5 | 2 |
| ZM6.3(4) | 1 | 2 | 4 |
| ZM6.3(3) | 0 | 0 | 2 |
| ZM6.3(5) | 0.5 | 1 | 4 |
| ZM6.3(H2) | 2 | 2 | 4 |
| ZM6.3(H3) | 2 | 2 | 4 |
| ZM6.3(1) | 1 | 1.5 | 4 |
| ZM6.3(G4) | 2 | 2.5 | 4 |
| ZM6.3(G1) | 4 | 4 | 4 |
| ZM6.3(G5) | 0 | 0 | 2 |
| ZM6.3(G2) | 2.5 | 4 | 4 |
| ZM6.3(H1) | 4 | 4 | 4 |
| ZM6.3(G6) | 4 | 4 | 4 |
| ZM6.3(G3) | 2 | 2.5 | 4 |
| ZM6.3(H6) | 4 | 4 | 4 |
| ZM6.3(H5) | 4 | 4 | 4 |

[0887] FIG. 12 shows the amino acid modifications of Zm6.3 variants relative to the Zm6.3 parental meganuclease. A (−) indicates that the amino acid is identical to Zm6.3.

### Example 18

### DNA Shuffling to Create Variants of Zm6.22v2 Meganuclease

[0888] An endogenous maize genomic target site comprising the Zm6.22v2 recognition sequence (SEQ ID NO:388) was selected for design of a custom double-strand break inducing agent. The Zm6.22v2 recognition site is a 22 bp polynucleotide having the following sequence: attgctctctcacatactttta (SEQ ID NO:388).

[0889] An engineered Zm6.22v2 meganuclease (SEQ ID NO:389). was produced as described in Example 3.

[0890] The first phase of Zm6.22v2 meganuclease optimization was designed to introduce amino acid modifications into the Zm6.22v2 meganuclease as described in Example 3. Libraries were based on introduction of mutations previously identified in LIG3-4, MHP14 and MHP77 variants with increased activity.

[0891] The shuffling process resulted in generation of variants with recombination of amino acid modifications, unintended amino acid modifications due to mutagenic PCR, deletions, and insertions (SEQ ID NOs: 390-403). Corresponding nucleotide sequences are shown in SEQ ID NOs:405-418.

[0892] A total of 13 ZM6.22v2 variants with increased activity were confirmed in the yeast system (as described in Example 6). Increased activity was observed across a range of temperatures: 28 degrees Celsius, 30 degrees Celsius and 37 degrees Celsius, as shown in Table 16.

TABLE 16
Activity of ZM6.22v2 variant Meganucleases in Yeast
Screening Strain assayed at different temperatures.

| meganuclease | 28° C. | 30° C. | 37° C. |
|---|---|---|---|
| ZM6.22v2 | 0 | 0 | 1 |
| ZM6.22v2(I2) | 1 | 2 | x |
| ZM6.22v2(J5) | | 0.5 | 4 |
| ZM6.22v2(J8) | | 1 | 3 |
| ZM6.22v2(J3) | | 0.5 | 3 |
| ZM6.22v2(J4) | | 0.5 | 3.5 |
| ZM6.22v2(J7) | | 0.5 | 3 |
| ZM6.22v2(I6) | 0.5 | 1 | 2 |
| ZM6.22v2(I4) | 0 | 0 | 3 |
| ZM6.22v2(I3) | 0 | 0 | 2 |
| ZM6.22v2(I5) | 0 | 0 | 0 |
| ZM6.22v2(J2) | | 0 | 2 |
| ZM6.22v2(I9) | | 0 | 2 |
| ZM6.22v2(I7) | | 0 | 2 |
| ZM6.22v2(I8) | | 0.5 | 2.5 |
| ZM6.22v2 | 0 | 0 | 1 |
| ZM6.22v2(I2) | 1 | 2 | x |
| ZM6.22v2(J5) | | 0.5 | 4 |
| ZM6.22v2(J8) | | 1 | 3 |

FIG. 13 shows the amino acid modifications of Zm6.22v2 variants relative to the Zm6.22v2 parental meganuclease. A (−) indicates that the amino acid is identical to Zm6.22v2

### Example 19

### Use of Different Amino Acid Linkers Sequences to Create Meganucleases with Increased Activity

[0893] As discussed in Example 3, all variant meganucleases comprised a linker polypeptide that links the two re-engineered I-CreI monomers into a single amino chain. The variant meganucleases MHP14(10) (SEQ ID NO:292) and MHP77(L9-01) (SEQ ID NO: 92) were created as described in Examples. These variant meganucleases were also characterized by having a different linker sequence when compared to the linker sequence in their respective parent meganucleases (FIG. 15A-FIG. 15D). In MHP14(10), a frameshift occurred at the second codon of the linker E160 and the reading frame was restored at 5193, the last residue of the linker. In MHP77(L9-01), a frameshift occurred at the first codon of the linker W159 and the reading frame was restored at L198. So the first 4 amino acids of the second unit of the linked dimer were changed. These data indicates that variant meganucleases can be created with a diverse linker sequence, while still obtaining increased meganuclease activity.

[0894] Alignment of the entire amino acid sequence (FIG. 15B) of LIG3-4 (SEQ ID NO:1), MHP14 (SEQ ID NO:282) MHP14(10) (SEQ ID NO:292), MHP77 (SEQ ID NO: 86), and MHP77(L9-01) (SEQ ID NO: 92) revealed a percent identity of as low as 80.8%. Hence, variant meganucleases were created that had increased meganuclease activity while having only 80% similarity to the parental meganuclease.

### Example 20

### Identification of Amino Acid Modifications in Structural Motifs of Meganucleases

[0895] An analysis of the physical positions of amino acid modifications responsible for increased meganuclease activity was performed using a three dimensional structure model of the I-CreI meganuclease dimer (Chevalier B S, Monnat Jr R J, Stoddard B L Nat. Struct. Biol. (2001) 8 p. 312). Amino acid modifications in alpha helix-1 positions 12, 16 and 19 were associated with increased activity observed with several meganuclease variants as shown in FIG. 16. Alpha helix-1 encompasses amino acids 8 through 19 on subunit number 1 and amino acids 195 through 206 on subunit number 2 in SEQ ID NO: 1. Additionally, amino acid modifications in alpha helix-5 positions 121, 124, 129, 131 and 132 were associated with increased activity observed in several meganuclease variants as shown in FIG. 16. Alpha helix-5 encompasses amino acids 120-135 on subunit number 1 and amino acids 307 through 322 on subunit number 2 in SEQ ID NO: 1. We predict that additional amino acid modifications in alpha helix-1 and alpha helix-5 have the potential to result in meganuclease variants with increased activity over the corresponding reference meganucleases.

### Example 21

### Transfer of at Least One Amino Acid Modification to Other Meganuclease to Create Variant Meganuclease with Increased Activity

[0896] As described in the Example 3-19, any one of the amino acid modifications identified in Examples 3-19 can be transferred to a parental meganuclease to create a variant meganuclease with increased activity. FIG. 14A-FIG. 14F list a subset of variant I-CreI type meganucleases with increased activity. Anyone of these amino acid modifications can be combined to create a new variant with increased activity.

[0897] One embodiment of this invention is the transfer of at least amino acid modification selected from the group of Y12 to H, G19 to S or A, Q50 to K or R, F54 to I, D56 to L, V105 to A, E124 to R, V129 to A, I132 to V or T, D153 to M or L, V316 to A or I 319 to V to a parental meganuclease in order to improve the activity of the parental meganuclease.

### Example 22

### Saturated Mutagenesis to Create Variant Meganucleases with Increased Activity

[0898] Saturated mutagenesis can be performed at any of the amino acid modification positions described in examples 3-21. Saturated mutagenesis will result in the production a set of meganucleases wherein one amino acid position is substituted with one of all possible amino acids. This set of meganucleases can then be analyzed for increased activity as described above resulting in identifying more possible modifications for an amino acid position that will result in an increased meganuclease activity.

### Example 23

### Creation and Analyses of TS21 and TS14 Variant Meganucleases in Soybean

### A. TS21 and TS14 Recognition Sites and Meganucleases

[0899] An endogenous soybean genomic target site comprising the TS21 recognition sequence (SEQ ID NO: 423) or the TS14 recognition sequence (SEQ ID NO: 424) was selected for design of a custom double-strand break inducing agent. The soybean genomic target sites and design of custom made TS21 and TS14 meganucleases have been described in U.S. patent application Ser. No. 13/427,138, filed on Mar. 22, 2012, which is incorporated by reference in its entirety.

### B. TS21 and TS14 Variant Meganucleases

[0900] To test if the LIG3-4 amino acid modifications (and respective nucleotide modifications) can also increase the activity of the soybean TS21 meganuclease and TS14 meganuclease, the exact same nucleotide/amino acid modifications as described for LIG3-4 (7), LIG3-4 (15), and Lig3-4(B65) (Table 1A) were introduced into TS21 meganuclease (SEQ ID NOs: 425 and 429) and TS14 meganuclease (SEQ ID NOs: 433 and 435) through standard molecular biology techniques, resulting in the following three TS21 meganuclease variants and one TS14 meganuclease variant: TS21(7) (SEQ ID NOs: 426 and 430), TS21(15) (SEQ ID NOs: 427 and 431), TS21(B65) (SEQ ID NOs: 428 and 432), and TS14(15) (SEQ ID NOs: 434 and 436) variants.

### C. Analyses of Meganuclease Activity of TS21 and TS14 Variants in Soybean

[0901] Genes encoding the TS21 and TS14 variant meganucleases were optimized for expression in plants. The engineered meganuclease expression cassettes contained the plant codon-optimized nucleotide sequences for better performance in soybean. The plant expression vectors for these soy variants were made by the same methods as described in U.S. patent application Ser. No. 13/427,138. The soybean ubiquitin promoter and the potato proteinase inhibitor II gene terminator sequences were used for controlling meganuclease expression in soybean. The methods used for soybean transformation, qPCR and genomic PCR assays for the TS21 and TS14 target sites were as described in United States patent application Ser. No. 13/427,138. The qPCR assays specific to the TS21 and TS14 recognition sequences were used to identify sequence changes. All hygromycin resistant soybean transgenic events were analyzed by qPCR assays. Changes in the meganuclease target sequence caused by DNA cleavage and repair result in the copy number reduction of the meganuclease target site from two copies in wild type soybean genome to either one or zero copies in the transgenic events. From qPCR analyses of the TS21 and TS14 target sites, it was shown that the copy numbers of the target sites in most of the positive transgenic events were reduced by half, indicating one allele of the recognition sites in soybean genome was disrupted by meganuclease cutting/DNA repair mechanism. As shown in Table 17, introducing the same amino acid modifications (mutations) as LIG3-4 variants into the TS21 meganuclease resulted in a dramatic increase of TS21 target site mutation rates for the TS21(7) variant meganuclease (32.1%) and the TS21(15) variant meganuclease (17.2%), a moderate increase for the TS21(B65) variant meganuclease when compared to the parental TS21 meganuclease (8.7%). As shown in Table 18, introducing the LIG3-4 (15) mutation into TS14 meganuclease resulted in a decrease of TS14 target site mutation rate from 16% for the parental TS14 meganuclease to 4% mutation rate for the TS14(15) variant meganuclease.

TABLE 17
Activity of TS21 variant meganucleases as determined by
target site qPCR hit rate (TS mutation rate) in soybean

| | Number of | TS Mutation |
|---|---|---|
| Meganuclease | events analyzed | Rate |
| TS21 | 184 | 8.7% |
| TS21 (7) | 187 | 32.1% |
| TS21 (15) | 192 | 17.2% |
| TS21 (B65) | 134 | 12.7% |

TABLE 18
Activity of TS14 variant meganuclease as determined by
target site mutation rate (TS mutation rate) in soybean

| | Number of | TS Mutation |
|---|---|---|
| Meganuclease | events analyzed | Rate |
| TS14 | 183 | 16% |
| TS14 (15) | 192 | 4% |

The application's sequence listing, which the Patent Office published only in electronic form, follows.

SEQUENCE LISTING (436 sequences)

SEQ ID NO: 1 - protein, 350 aa, artificial sequence
  LIG3-4
MNTKYNKEFLLYLAGFVDGDGSIKAQIKPNQSCKFKHQLSLTFQVTQKTQRRWFLDKLVDEIGVGYVYDRGSVSDYELSQIKPLHNFLTQLQPFLKLKQKQANLVLKIIEQLPSAKESPDKFLEVCTWVDQIAALNDSKTRKTTSETVRAVLDSLPGSVGGLSPSQASSAASSASSSPGSGISEALRAGATKSKEFLLYLAGFVDGDGSIIASIKPRQCYKFKHELRLEFTVTQKTQRRWFLDKLVDEIGVGYVYDRGSVSDYRLSQIKPLHNFLTQLQPFLKLKQKQANLVLKIIEQLPSAKESPDKFLEVCTWVDQIAALNDSKTRKTTSETVRAVLDSLSEKKKSSP

SEQ ID NO: 2 - DNA, 22 bp, zea mays
atatacctcacacgtacgcgta

SEQ ID NO: 3 - protein, 163 aa, Chlamydomonas reinhardtii
MNTKYNKEFLLYLAGFVDGDGSIIAQIKPNQSYKFKHQLSLAFQVTQKTQRRWFLDKLVDEIGVGYVRDRGSVSDYILSEIKPLHNFLTQLQPFLKLKQKQANLVLKIIWRLPSAKESPDKFLEVCTWVDQIAALNDSKTRKTTSETVRAVLDSLSEKKKSSP

SEQ ID NO: 4 - protein, 171 aa, Carteria lunzensis
MNKFTPDQLLYLAGLIDGDGSIIAQLVSRKDYTWEFQIRLTVQVTQLKKRRWFLEELQKEIGAGSVRDRDTVSDYILTETSNVYKFLKDLQPHLRLKQKQANLVLRIIEQLPSSKASKEIFLELCNVVDHVATLNDTKKRKYTAEIVAAKLKELKECVVPVETSEETNSGI

SEQ ID NO: 5 - protein, 167 aa, Scenedesmus obliquus
MTNNNMQNKGMKIIDKDELIYLAGFIDGDGSLIAQMVRRHDYKFKYQIKCTVQITQLKKRRHFLEKIQESIGYGIIRDRGTISDYVLVEPKCVYWLLKQLSPFLRLKKKQADLIIRIIEQLTSSKNSAVLFVQLCRLTDQVALLNDSKSRTITAEVVETTLRELGLI

SEQ ID NO: 6 - protein, 166 aa, Haematococcus lacustris
MKNINSTRFSHLTNEQKAYLAGFIDCDGSLMAQIVRKPDYAYKFQIRVTIQLSQRTSRIHFLKEIASEVGYGYVVSRNNMSDYVITQANIVYELLSLLLPYLRMKVKQANLILKIIQELPSAKVSKDKFIELCILANQVSILNTPNKILKNTWQVVKAELESEDLQ

SEQ ID NO: 7 - protein, 162 aa, Mesostigma viride
MKLIDEKVCAYIAGFLDGDGCLMAQIIKGVYKYKFRIRLSIVFYQHAKRKWFLLQLKKLFDDIGYVRIHKTNNMCDYTITGSRSIEHILLQLMPYIQLKKTSAALMLQLIKKEKLVTTKADFIEVCQLVDKIAEQNFSKKRIITSKVVEATLMLPVETEKSS

SEQ ID NO: 8 - protein, 165 aa, Oltmannsiellopsis viridis
MVIPREDLLNITMNLTEQEKIYLGGFVDGDGCINAQIVRRKDYLLKFQIRVTVSFYQKTKRHWFIKWVHKKLKYGSIRKRNDGMSEYNIVGNHAVKKVVNELQPYIRIKQPQVRLVLEIIEKLPEAKDPLTFVALCERVDLFERLNDSKKRVITSETVRSELGID

SEQ ID NO: 9 - protein, 168 aa, Trichosarcina mucosa
MSKLKKLTPEELCYLAGFLDGDGCINAQIVRRSDYKLKFQIRVSITFFQKTNRHWFLIWLDKKLDCGTLRKRPDKMSEYAIIGIASVRNILLLFKPYLKLKKRQAILLLKVIEKMPSTQNDPQAFFKLCEQVDQFSEFNDSKKRKLTSQVVRSEIGTAIHLFPVETET

SEQ ID NO: 10 - protein, 170 aa, Chlorokybus atmophyticus
MNVIKESEKAYIAGFLDGDGCINAQLVRRSGYRLLYQIRVSITFFQSSKRHWFLLQLHKRLGCGSVRKRNDGISEYCIVGIASVSAVCEQLLPYLRLKRRQAVLICTIIKSLSRHQSKEDFLSLCELADQISFLNNSKKRSNTACLVRKELDLLFPVETSDTKVGDTSSG

SEQ ID NO: 11 - protein, 164 aa, Acanthamoeba castellanii
MQKNQFKKLNNEQLAYLAGFVEADGCFLVQIIPGLQYRYKHTIRISIVFYQKKDKHWYFLQLKNLIGLGSIRFRNDGMLEYSITGLSLVNKFLEMLFPYLILKKNLAVLIFRIIKGLNDVKNEAGFLEVCKLVDEVADHTYSKKRKNTSLTVKNSLLLPVETEE

SEQ ID NO: 12 - protein, 167 aa, Scherffelia dubia
MNKLTKLQENELAYIAGFIDGDGCINAQIIRRVDYKLKFQIRFSVTIIQKTSRHWVVLWFQKKLGCGQIRKRNDGISEYSLVGKNDVQNFLQLIKPFLKVKRRQAQLILEICQQISKEQDPQSFVKLCERVDSIAKLNDSKKRIITSDVVRSILLNSVQKFPVETET

SEQ ID NO: 13 - protein, 168 aa, Pseudendoclonium akinetum
MSKLKKIIPEELSYLAGFLDGDGCINAQIVRRSDYKLKFQIRVSITFFQKTNRHWFLIWLDKKLDCGTLRKRPDGMSEYAIIGIASVRNLLSILKPYLKLKKRQAILLLKIIEKMPHIQNDPQLFLKLCEQVDHFSEFNDSKKRKLTSQVVRSEIGETLNLFPVETET

SEQ ID NO: 14 - protein, 350 aa, artificial sequence
  LIG3-4(7)
MNTKYNKEFLLYLAGIVDGDGSIKAQIKPNQSCKFKHQLSLTFQVTQKTQRRWFLDKLVDEIGVGYVYDRGSVSDYELSQIKPLHNFLTQLQPFLKLKQKQANLVLKIIEQLPSAKESPDKFLEVCTWVDQIAALNDSKTRKTTSETVRAVLDSLPGSVGGLSPSQASSAASSASSSPGSGISEGLRAGATKSKEFLLYLAGFVDGDGSIIASIKPRQCYKFKHELRLEFTVTQKTQRRWFLDELVDEIGVGYVYDRGSVSDYRLSQIKPLHNFLTQLQPFLKLKQKQANLVLKIIEQLPSAKESPDKFLEVCTWADQIAALNDSKTRKTTSETVRAVLDSLSEKKKSSP

SEQ ID NO: 15 - protein, 350 aa, artificial sequence
  LIG3-4(15)
MNTKYNKEFLLYLAGFVDSDGSIKAQIKPNQSCKFKHQLSLTFQVTQKTQRRWFLDKLVDEIGVGYVYDRGSVSDYELSQIKPLHNFLTQLQPFLKLKQKQANLVLKIIEQLPSAKESPDKFLEVCTWVDQIAALNDSKTRKTTSETVRAVLDSLPGSVGGLSPSQASSAASSASSSPGSGISEALRAGATKSKEFLLYLAGFVDGDGSIIASIKPRQCYKFKHELRLEFTVTQKTQRRWFLDKLVDEIGVGYVYDRGSVSDYRLSQIKPLHNFLTQLQPFLKLKQKQANLVLKIIEQLPSAKESPDKFLEVCTWVDQIAALNDSKTRKTTSETVRAVLDSLSEKKKSSP

SEQ ID NO: 16 - protein, 350 aa, artificial sequence
  LIG3-4(A4)
MNTKYNKEFLLYLAGFVDGDGSIKAQIKPNQSCKFKHQLSLTFQVTQKTQRRWFLDKLVDEIGVGYVYDRGSVSDYELSQIKPLHNFLTQLQPFLKLKQKQANLVLKIIEQLPSAKESPDKFLEVCTWVDQVAALNDSKTRKTTSETVRAVLDSLPGSVGGLSPSQASSAASSASSSPGSGISEALRAGATKSKEFLLYLAGFVDGDGSIIASIKPRQCYKFKHELRLEFTVTQKTQRRWFLDKLVDEIGVGYVYDRGSVSDYRLSQIKPLHNFLTQLQPFLKLKQKQANLVLKIIEQLPSAKESPDKFLEVCTWVDQVAALNDSKTRKTTSETVRAVLDSLSEKKKSSP

SEQ ID NO: 17 - protein, 350 aa, artificial sequence
  LIG3-4(A6)
MNTKYNKEFLLYLAGFVDGDGSIKAQIKPNQSCKFKHQLSLTFQVTQKTQRRWFLDKLVDEIGVGYVYDRGSVSDYELSQIKPLHNFLTQLQPFLKLKQKQANLVLKIIEQLPSAKESPDKFLEVCTWVDQVAALNDSKTRKTTSETVRAVLDSLPGSVGGLSPSQASSAASSASSSPGSGISEALRAGATKSKEFLLYLAGFVDGDGSIIASIKPRQCYKFKHELRLEFTVTQKTQRRWFLDKLVDEIGVGYVYDRGSVSDYRLSQIKPLHNFLTQLQPYLKLKQKQANLVLKIIEQLPSAKESPDKFLEVCTWVDQIAALNDSKTRKTTSETVRAVLDSLSEKKKSSP

SEQ ID NO: 18 - protein, 350 aa, artificial sequence
  LIG3-4(B1)
MNTKYNKEFLLYLAGFVDGDGCIKAQIKPNQSCKFKHQLSLTFQVTQKTQRRWFLDKLVDEIGVGYVYDRPSVSDYELSQIKPLHNFLTQLQPFLKLKQKQANLVLKIIEQLPSAKESPDKFLEVCTWVDQIAALNDSKTRKTTSETVRAVLDSLPGSVGGLSPSQASSAASSASSSPGSGISEALRAGATKSKEFLLYLAGFVDGDGSIIASIKPRQCYKFKHELRLEFTVTQKTQRRWFLDKLVDEIGVGYVYDRKSVSDYRLSQIKPLHNFLTQLQPFLKLKQKQANLVLKIIEQLPSAKESPDKFLEVCTWVDQIAALNDSKTRKTTSETVRAVLDSLSEKKKSSP

SEQ ID NO: 19 - protein, 350 aa, artificial sequence
  LIG3-4(B15)
MNTKYNKEFLLYLAGFVDGDGCIKAQIKPNQSCKFKHQLSLTFQVTQKTQRRWFLDKLVDEIGVGYVYDRGSVSDYELSQIKPLHNFLTQLQPFLKLKQKQANLVLKIIEQLPSAKESPDKFLEVCTWVDQIAALNDSKTRKTTSETVRAVLDSLPGSVGGLSPSQASSAASSASSSPGSGISEALRAGATKSKEFLLYLAGFVDGDGSIIASIKPRQCYKFKHELRLEFTVTQKTQRRWFLDKLVDEIGVGYVYDRKSVSDYRLSQIKPLHNFLTQLQPFLKLKQKQANLVLKIIEQLPSAKESPDKFLEVCTWVDQIAALNDSKTRKTTSETVRAVLDSLSEKKKSSP

SEQ ID NO: 20 - protein, 350 aa, artificial sequence
  LIG3-4(B16)
MNTKYNKEFLLYLAGFVDGDGCIKAQIKPNQSCKFKHQLSLTFQVTQKTKRRWFLDKLVDEIGVGYVYDRGSVSDYELSQIKPLHNFLTQLQPFLKLKQKQANLVLKIIEQLPSAKESPDKFLEVCTWVDQIAALNDSKTRKTTSETVRAVLDSLPGSVGGLSPSQASSAASSASSSPGSGISEALRAGATKSKEFLLYLAGFVDGDGSIIASIKPRQCYKFKHELRLEFTVTQKTQRRWFLDKLVDEIGVGYVYDRGSVSDYRLSQIKPLHNFLTQLQPFLKLKQKQANLVLKIIEQLPSAKESPDKFLEVCTWVDQIAALNDSKTRKTTSETVRAVLDSLSEKKKSSP

SEQ ID NO: 21 - protein, 350 aa, artificial sequence
  LIG3-4(B24)
MNTKYNKEFLLYLAGFVDGDGCIKAQIKPNQSCKFKHQLSLTFQVTQKTQRRWFLDKLVDEIGVGYVYDRGSVSDYELSQIKPLHNFLTQLQPFLKLKQKQANLVLKIIEQLPSAKESPDKFLEVCTWVDQIAALNDSKTRKTTSETVRAVLDSLPGSVGGLSPSQASSAASSASSSPGSGISEALRAGATKSKEFLLYLAGFVDGDGSIIASIKPRQCYKFKHELRLEFTVTQKTQRRWFLDKLVDEIGVGYVYDRGSVSDYRLSQIKPLHNFLTQLQPFLKLKQKQANLVLKIIEQLPSAKESPDKFLEVCTWVDQIAALNDSKTRKTTSETVRAVLDSLSEKKKSSP

SEQ ID NO: 22 - protein, 350 aa, artificial sequence
  LIG3-4(B36)
MNTKYNKEFLLYLAGFVDGDGSIKAQIKPNQSCKFKHQLSLTFQVTQKTQRRWFLDKLVDEIGVGYVYDRKSVSDYELSQIKPLHNFLTQLQPFLKLKQKQANLVLKIIEQLPSAKESPDKFLEVCTWVDQIAALNDSKTRKTTSETVRAVLDSLPGSVGGLSPSQASSAASSASSSPGSGISEALRAGATKSKEFLLYLAGFVDGDGSIIASIKPRQCYKFKHELRLEFTVTQKTQRRWFLDKLVDEIGVGYVYDRKSVSDYRLSQIKPLHNFLTQLQPFLKLKQKQANLVLKIIEQLPSAKESPDKFLEVCTWVDQIAALNDSKTRKTTSETVRAVLDSLSEKKKSSP

SEQ ID NO: 23 - protein, 350 aa, artificial sequence
  LIG3-4(B38)
MNTKYNKEFLLYLAGFVDGDGCIKAQIKPNQSCKFKHQLSLTFQVTQKTQRRWFLDKLVDEIGVGYVYDRGSVSDYELSQIKPLHNFLTQLQPFLKLKQKQANLVLKIIEQLPSAKESPDKFLEVCTWVDQIAALNDSKTRKTTSETVRAVLDSLPGSVGGLSPSQASSAASSASSSPGSGISEALRAGATKSKEFLLYLAGFVDGDGSIIASIKPRQCYKFKHELRLEFTVTQKTQRRWFLDKLVDEIGVGYVYDRPSVSDYRLSQIKPLHNFLTQLQPFLKLKQKQANLVLKIIEQLPSAKESPDKFLEVCTWVDQIAALNDSKTRKTTSETVRAVLDSLSEKKKSSP

SEQ ID NO: 24 - protein, 350 aa, artificial sequence
  LIG3-4(B39)
MNTKYNKEFLLYLAGFVDGDGCIKAQIKPNQSCKFKHQLSLTFQVTQKTQRRWFLDKLVDEIGVGYVYDRPSVSDYELSQIKPLHNFLTQLQPFLKLKQKQANLVLKIIEQLPSAKESPDKFLEVCTWVDQIAALNDSKTRKTTSETVRAVLDSLPGSVGGLSPSQASSAASSASSSPGSGISEALRAGATKSKEFLLYLAGFVDGDGSIIASIKPRQCYKFKHELRLEFTVTQKTQRRWFLDKLVDEIGVGYVYDRPSVSDYRLSQIKPLHNFLTQLQPFLKLKQKQANLVLKIIEQLPSAKESPDKFLEVCTWVDQIAALNDSKTRKTTSETVRAVLDSLSENNKSSP

SEQ ID NO: 25 - protein, 350 aa, artificial sequence
  LIG3-4(B40)
MNTKYNKEFLLYLAGFVDGDGSIKAQIKPNQSCKFKHQLSLTFQVTQKTKRRWFLDKLVDEIGVGYVYDRGSVSDYELSQIKPLHNFLTQLQPFLKLKQKQANLVLKIIEQLPSAKESPDKFLEVCTWVDQIAALNDSKTRKTTSETVRAVLDSLPGSVGGLSPSQASSAASSASSSPGSGISEALRAGATKSKEFLLYLAGFVDGDGSIIASIKPRQCYKFKHELRLEFTVTQKTQRRWFLDKLVDEIGVGYVYDRKSVSDYRLSQIKPLHNFLTQLQPFLKLKQKQANLVLKIIEQLPSAKESPDKFLEVCTWVDQIAALNDSKTRKTTSETVRAVLDSLSEKKKSSP

SEQ ID NO: 26 - protein, 350 aa, artificial sequence
  LIG3-4(B55)
MNTKYNKEFLLYLAGFVDGDGCIKAQIKPNQSCKFKHQLSLTFQVTQKTQRRWFLDKLVDEIGVGYVYDRGSVSDYELSQIKPLHNFLTQLQPFLKLKQKQANLVLKIIEQLPSAKESPDKFLEVCTWVDQIAALNDSKTRKTTSETVRAVLDSLPGSVGGLSPSQASSAASSASSSPGSGISEALRAGATKSKEFLLYLAGFVDGDGCIIASIKPRQCYKFKHELRLEFTVTQKTQRRWFLDKLVDEIGVGYVYDRKSVSDYRLSQIKPLHNFLTQLQPFLKLKQKQANLVLKIIEQLPSAKESPDKFLEVCTWVDQIAALNDSKTRKTTSETVRAVLDSLSEKKKSSP

SEQ ID NO: 27 - protein, 350 aa, artificial sequence
  LIG3-4(B65)
MNTKYNKEFLLYLAGFVDGDGCIKAQIKPNQSCKFKHQLSLTFQVTQKTKRRWFLDKLVDEIGVGYVYDRKSVSDYELSQIKPLHNFLTQLQPFLKLKQKQANLVLKIIEQLPSAKESPDKFLEVCTWVDQIAALNDSKTRKTTSETVRAVLDSLPGSVGGLSPSQASSAASSASSSPGSGISEALRAGATKSKEFLLYLAGFVDGDGSIIASIKPRQCYKFKHELRLEFTVTQKTQRRWFLDKLVDEIGVGYVYDRKSVSDYRLSQIKPLHNFLTQLQPFLKLKQKQANLVLKIIEQLPSAKESPDKFLEVCTWVDQIAALNDSKTRKTTSETVRAVLDSLSEKKKSSP

SEQ ID NO: 28 - protein, 350 aa, artificial sequence
  LIG3-4(B70)
MNTKYNKEFLLYLAGFVDGDGCIKAQIKPNQSCKFKHQLSLTFQVTQKTKRRWFLDKLVDEIGVGYVYDRKSVSDYELSQIKPLHNFLTQLQPFLKLKQKQANLVLKIIEQLPSAKESPDKFLEVCTWVDQIAALNDSKTRKTTSETVRAVLDSLPGSVGGLSPSQASSAASSASSSPGSGISEALRAGATKSKEFLLYLAGFVDGDGSIIASIKPRQCYKFKHELRLEFTVTQKTQRRWFLDKLVDEIGVGYVYDRPSVSDYRLSQIKPLHNFLTQLQPFLKLKQKQANLVLKIIEQLPSAKESPDKFLEVCTWVDQIAALNDSKTRKTTSETVRAVLDSLSEKKKSSP

SEQ ID NO: 29 - protein, 350 aa, artificial sequence
  LIG3-4(B71)
MNTKYNKEFLLYLAGFVDGDGCIKAQIKPNQSCKFKHQLSLTFQVTQKTQRRWFLDKLVDEIGVGYVYDRKSVSDYELSQIKPLHNFLTQLQPFLKLKQKQANLVLKIIEQLPSAKESPDKFLEVCTWVDQIAALNDSKTRKTTSETVRAVLDSLPGSVGGLSPSQASSAASSASSSPGSGISEALRAGATKSKEFLLYLAGFVDGDGSIIASIKPRQCYKFKHELRLEFTVTQKTQRRWFLDKLVDEIGVGYVYDRPSVSDYRLSQIKPLHNFLTQLQPFLKLKQKQANLVLKIIEQLPSAKESPDKFLEVCTWVDQIAALNDSKTRKTTSETVRAVLDSLSEKKKSSP

SEQ ID NO: 30 - protein, 350 aa, artificial sequence
  LIG3-4(B73)
MNTKYNKEFLLYLAGFVDGDGCIKAQIKPNQSCKFKHQLSLTFQVTQKTQRRWFLDKLVDEIGVGYVYDRKSVSDYELSQIKPLHNFLTQLQPFLKLKQKQANLVLKIIEQLPSAKESPDKFLEVCTWVDQIAALNDSKTRKTTSETVRAVLDSLPGSVGGLSPSQASSAASSASSSPGSGISEALRAGATKSKEFLLYLAGFVDGDGSIIASIKPRQCYKFKHELRLEFTVTQKTQRRWFLDKLVDEIGVGYVYDRKSVSDYRLSQIKPLHNFLTQLQPFLKLKQKQANLVLKIIEQLPSAKESPDKFLEVCTWVDQIAALNDSKTRKTTSETVRAVLDSLSEKKKSSP

SEQ ID NO: 31 - protein, 350 aa, artificial sequence
  LIG3-4(B75)
MNTKYNKEFLLYLAGFVDGDGCIKAQIKPNQSCKFKHQLSLTFQVTQKTKRRWFLDKLVDEIGVGYVYDRPSVSDYELSQIKPLHNFLTQLQPFLKLKQKQANLVLKIIEQLPSAKESPDKFLEVCTWVDQIAALNDSKTRKTTSETVRAVLDSLPGSVGGLSPSQASSAASSASSSPGSGISEALRAGATKSKEFLLYLAGFVDGDGSIIASIKPRQCYKFKHELRLEFTVTQKTQRRWFLDKLVDEIGVGYVYDRKSVSDYRLSQIKPLHNFLTQLQPFLKLKQKQANLVLKIIEQLPSAKESPDKFLEVCTWVDQIAALNDSKTRKTTSETVRAVLDSLSEKKKSSP

SEQ ID NO: 32 - protein, 350 aa, artificial sequence
  LIG3-4(B76)
MNTKYNKEFLLYLAGFVDGDGCIKAQIKPNQSCKFKHQLSLTFQVTQKTKRRWFLDKLVDEIGVGYVYDRGSVSDYELSQIKPLHNFLTQLQPFLKLKQKQANLVLKIIEQLPSAKESPDKFLEVCTWVDQIAALNDSKTRKTTSETVRAVLDSLPGSVGGLSPSQASSAASSASSSPGSGISEALRAGATKSKEFLLYLAGFVDGDGSIIASIKPRQCYKFKHELRLEFTVTQKTQRRWFLDKLVDEIGVGYVYDRKSVSDYRLSQIKPLHNFLTQLQPFLKLKQKQANLVLKIIEQLPSAKESPDKFLEVCTWVDQIAALNDSKTRKTTSETVRAVLDSLSEKKKSSP

SEQ ID NO: 33 - protein, 350 aa, artificial sequence
  LIG3-4(B78)
MNTKYNKEFLLYLAGFVDGDGCIKAQIKPNQSCKFKHQLSLTFQVTQKTQRRWFLDKLVDEIGVGYVYDRPSVSDYELSQIKPLHNFLTQLQPFLKLKQKQANLVLKIIEQLPSAKESPDKFLEVCTWVDQIAALNDSKTRKTTSETVRAVLDSLPGSVGGLSPSQASSAASSASSSPGSGISEALRAGATKSKEFLLYLAGFVDGDGSIIASIKPRQCYKFKHELRLEFTVTQKTQRRWFLDKLVDEIGVGYVYDRKSVSDYRLSQIKPLHNFLTQLQPFLKLKQKQANLVLKIIEQLPSAKESPDKFLEVCTWVDQIAALNDSKTRKTTSETVRAVLDSLSENNKSSP

SEQ ID NO: 34 - protein, 350 aa, artificial sequence
  LIG3-4(B82)
MNTKYNKEFLLYLAGFVDGDGCIKAQIKPNQSCKFKHQLSLTFQVTQKTKRRWFLDKLVDEIGVGYVYDRKSVSDYELSQIKPLHNFLTQLQPFLKLKQKQANLVLKIIEQLPSAKESPDKFLEVCTWVDQIAALNDSKTRKTTSETVRAVLDSLPGSVGGLSPSQASSAASSASSSPGSGISEALRAGATKSKEFLLYLAGFVDGDGCIIASIKPRQCYKFKHELRLEFTVTQKTQRRWFLDKLVDEIGVGYVYDRKSVSDYRLSQIKPLHNFLTQLQPFLKLKQKQANLVLKIIEQLPSAKESPDKFLEVCTWVDQIAALNDSKTRKTTSETVRAVLDSLSEKKKSSP

SEQ ID NO: 35 - protein, 350 aa, artificial sequence
  LIG3-4(C1)
MNTKYNKEFLLYLAGFVDGDGCIKAQIKPNQSCKFKHQLSLTFQVTQKTQRRWFLDKLVDEIGVGYVYDRKSVSDYELSQIKPLHNFLTQLQPFLKLKQKQANLVLKIIEQLPSAKESPDKFLEVCTWVDQIAALNDSKTRKTTSETVRAVLDSLPGSVGGLSPSQASSAASSASSSPGSGISEALRAGATKSKEFLLYLAGFVDGDGSIIASIKPRQCYKLKHELRLEFTVTQKTQRRWFLDKLVDEIGVGYVYDRGSVSDYRLSQIKPLHNFLTQLQPFLKLKQKQANLVLKIIEQLPSAKESPDKFLEVCTWVDQIAALNDSKTRKTTSETVRAVLDSLSENNKSSP

SEQ ID NO: 36 - protein, 350 aa, artificial sequence
  LIG3-4(D5)
MNTKYNKEFLLYLAGFVDGDGSIKAQIKPNQSCKFKHQLSLTFQVTQKTQRRWFLDKLVDEIGVGYVYDRGSVSDYELSQKKPLHNFLTQLQPFLKLKQKQAVLVLKIIEQLPSAKESPDKFLEVCTWVDQIAALNDSKTRKTTSETVRAVLMSLPGSVGGLSPSQASSAASSASSSPGSGISEALRAGATKSKEFLLYLAGFVDGDGSIIASIKPRQCYKFKHELRLEFTVTQKTQRRWFLDKLHDEIGVGYVYDRGSVSDYRLSQIKPLHNFLTQLQPFLKLKQKQANLVLKIIEQLPSAKESPDGFLEVCTWVDQIAALNDSKTRKTTSETVRAVLDSLSEKKKSSP

SEQ ID NO: 37 - protein, 350 aa, artificial sequence
  LIG3-4(D7)
MNTKYNKEFLLYLAGFVDGDGSIKAQIKPNQSCKFKHQLSLTFQVTQKTRRRWFLLKLVDEIGVGYVYDRGSVSDYELSQKKPLHNFLTQLQPFLKLKQKQANLVLKIIEQLPSAKESPDKFLEVCTWVDQIAALNDSKTRKTTSETVRAVLLSLPGSVGGLSPSQASSAASSASSSPGSGISEALRAGATKSKEFLLYLAGFVDGDGSIIASIKPRQCYKFKHELRLEFTVTQKTQRRWFLDKLVDEIGVGYVYDRGSVSDYRLSQIKPLHNFLTQLQPFLKLKQKQANLVLKIIEQLPSAKESPDKFLEVCTWVDQIAALNDSKTRKTTSETVRAVLDSLSEKKKSSP

SEQ ID NO: 38 - protein, 350 aa, artificial sequence
  LIG3-4(D8)
MNTKYNKEFLLYLAGFVDGDGSIKAQIKPNQSCKFKHQLSLTFQVTQKTQRRWILDKLHDEIGVGYVYDRGSVSDYELSQIKPLHNFLTQLQPFLKLKQKQANLVLKIIEQLPSAKESPDGFLEVCTWVDQIAALNDSKTRKTTSETVRAVLDSLPGSVGGLSPSQASSAASSASSSPGSGISEALRAGATKSKEFLLYLAGFVDGDGSIIASIKPRQCYKFKHELRLEFTVTQKTQRRWFLDKLVDEIGVGYVYDRGSVSDYRLSQIKPLHNFLTQLQPFLKLKQKQANLVLKIIEQLPSAKESPDKFLEVCTWVDQIAALNDSKTRKTTSETVRAVLDSLSEKKKSSP

SEQ ID NO: 39 - DNA, 1050 bp, artificial sequence
  LIG3-4maize
atgaacaccaagtacaacaaggagttcctgctctacctggccggcttcgtggacggcgacggctccatcaaggcgcagatcaagccgaaccagtcctgcaagttcaagcaccagctctccctgaccttccaggtgacccagaagacgcagaggcgctggttcctcgacaagctggtcgacgagatcggggtgggctacgtctacgaccgcgggtcggtgtccgactacgagctctcccagatcaagcccctgcacaacttcctcacccagctccagccgttcctcaagctgaagcagaagcaggcgaacctcgtcctgaagatcatcgagcagctcccctcggccaaggagtccccggacaagttcctggaggtgtgcacgtgggtcgaccagatcgcggccctcaacgacagcaagacccgcaagacgacctcggagacggtgcgggcggtcctggactccctcccaggatccgtgggaggtctatcgccatctcaggcatccagcgccgcatcctcggcttcctcaagcccgggttcagggatctccgaagcactcagagctggagcaactaagtccaaggaattcctgctctacctggccggcttcgtggacggcgacggctccatcatcgcgtccatcaagccgcgccagtgctacaagttcaagcacgagctccgcctggagttcaccgtgacccagaagacgcagaggcgctggttcctcgacaagctggtcgacgagatcggggtgggctacgtctacgaccgcgggtcggtgtccgactaccgcctctcccagatcaagcccctgcacaacttcctcacccagctccagccgttcctcaagctgaagcagaagcaggcgaacctcgtcctgaagatcatcgagcagctcccctcggccaaggagtccccggacaagttcctggaggtgtgcacgtgggtcgaccagatcgcggccctcaacgacagcaagacccgcaagacgacctcggagacggtgcgggcggtcctggactccctcagcgagaagaagaagtcgtccccc

SEQ ID NO: 40 - DNA, 1050 bp, artificial sequence
  LIG3-4yeast
atgaacaccaagtacaacaaggagttcctgctctacctggccggcttcgtggacggcgacggctccatcaaggcgcagatcaagccgaaccagtcctgcaagttcaagcaccagctctccctgaccttccaggtgacccagaagacgcagaggcgctggttcctcgacaagctggtcgacgagatcggggtgggctacgtctacgaccgcgggtcggtgtccgactacgagctctcccagatcaagcccctgcacaacttcctcacccagctccagccgttcctcaagctgaagcagaagcaggcgaacctcgtcctgaagatcatcgagcagctcccctcggccaaggagtccccggacaagttcctggaggtgtgcacgtgggtcgaccagatcgcggccctcaacgacagcaagacccgcaagacgacctcggagacggtgcgggcggtcctggactccctcccaggatccgtgggaggtctatcgccatctcaggcatccagcgccgcatcctcggcttcctcaagcccgggttcagggatctccgaagcactcagagctggagcaactaagtccaaagagtttttattatatttagcggggtttgtcgatggggatgggagtataatagccagtataaaacccaggcaatgttataaatttaaacatgaattaaggttagaatttacggtcacgcaaaaaacccaacgtaggtggtttttagataaattagtggatgaaataggcgtcgggtatgtgtatgataggggcagcgtcagtgattataggttaagtcaaataaaaccgttacataattttttaacgcaattacaaccctttttaaaattaaaacaaaaacaagccaatttagtgttaaaaataatagaacaattaccgagcgcgaaagaaagtcccgataaatttttagaagtctgtacctgggtggatcaaatagccgcgttaaatgattcaaaaacgaggaaaaccacgagcgaaaccgtcagagccgtgttagatagtttatcagaaaagaagaaaagcagtccg

SEQ ID NO: 41 - DNA, 1050 bp, artificial sequence
  LIG3-4(7)
atgaacaccaagtacaacaaggagttcctgctctacctggccggcatcgtggacggcgacggctccatcaaggcgcagatcaagccgaaccagtcctgcaagttcaagcaccagctctccctgaccttccaggtgacccagaagacgcagaggcgctggttcctcgacaagctggtcgacgagatcggggtgggctacgtctacgaccgcgggtcggtgtccgactacgagctctcccagatcaagcccctgcacaacttcctcacccagctccagccgttcctcaagctgaagcagaagcaggcgaacctcgtcctgaagatcatcgagcagctcccctcggccaaggagtccccggacaagttcctggaggtgtgcacgtgggtcgaccagatcgcggccctcaacgacagcaagacccgcaagacgacctcggagacggtgcgggcggtcctggactccctcccaggatccgtgggaggtctatcgccatctcaggcatccagcgccgcatcctcggcttcctcaagcccgggttcagggatctccgaaggactcagagctggagcaactaagtccaaggaattcctgctctacctggccggcttcgtggacggcgacggctccatcatcgcgtccatcaagccgcgccagtgctacaagttcaagcacgagctccgcctggagttcaccgtgacccagaagacgcagaggcgctggttcctcgacgagctggtcgacgagatcggggtgggctacgtctacgaccgcgggtcggtgtccgactaccgcctctcccagatcaagcccctgcacaacttcctcacccagctccagccgttcctcaagctgaagcagaagcaggcgaacctcgtcctgaagatcatcgagcagctcccctcggccaaggagtccccggacaagttcctggaggtgtgcacgtgggccgaccagatcgcggccctcaacgacagcaagacccgcaagacgacctcggagacggtgcgggcggtcctggactccctcagcgagaagaagaagtcgtccccc

SEQ ID NO: 42 - DNA, 1050 bp, artificial sequence
  LIG3-4(15)
atgaacaccaagtacaacaaggagttcctgctctacctggccggcttcgtggacagcgacggctccatcaaggcgcagatcaagccgaaccagtcctgcaagttcaagcaccagctctccctgaccttccaggtgacccagaagacgcagaggcgctggttcctcgacaagctggtcgacgagatcggggtgggctacgtctacgaccgcgggtcggtgtccgactacgagctctcccagatcaagcccctgcacaacttcctcacccagctccagccgttcctcaagctgaagcagaagcaggcgaacctcgtcctgaagatcatcgagcagctcccctcggccaaggagtccccggacaagttcctggaggtgtgcacgtgggtcgaccagatcgcggccctcaacgacagcaagacccgcaagacgacctcggagacggtgcgggcggtcctggactccctcccaggatccgtgggaggtctatcgccatctcaggcatccagcgccgcatcctcggcttcctcaagcccgggttcagggatctccgaagcactcagagctggagcaactaagtccaaggaattcctgctctacctggccggcttcgtggacggcgacggctccatcatcgcgtccatcaagccgcgccagtgctacaagttcaagcacgagctccgcctggagttcaccgtgacccagaagacgcagaggcgctggttcctcgacaagctggtcgacgagatcggggtgggctacgtctacgaccgcgggtcggtgtccgactaccgcctctcccagatcaagcccctgcacaacttcctcacccagctccagccgttcctcaagctgaagcagaagcaggcgaacctcgtcctgaagatcatcgagcagctcccctcggccaaggagtccccggacaagttcctggaggtgtgcacgtgggtcgaccagatcgcggccctcaacgacagcaagacccgcaagacgacctcggagacggtgcgggcggtcctggactccctcagcgagaagaagaagtcgtccccc

SEQ ID NO: 43 - DNA, 1050 bp, artificial sequence
  LIG3-4(A4)
atgaacaccaagtacaacaaggagttcctgctctacctggccggcttcgtggacggcgacggctccatcaaggcgcagatcaagccgaaccagtcctgcaagttcaagcaccagctctccctgaccttccaggtgacccagaagacgcagaggcgctggttcctcgacaagctggtcgacgagatcggggtgggctacgtctacgaccgcgggtcggtgtccgactacgagctctcccagatcaagcccctgcacaacttcctcacccagctccagccgttcctcaagctgaagcagaagcaggcgaacctcgtcctgaagatcatcgagcagctcccctcggccaaggagtccccggacaagttcctggaggtgtgcacgtgggtcgaccaggtcgcggccctcaacgacagcaagacccgcaagacgacctcggagacggtgcgggcggtcctggactccctcccaggatccgtgggaggtctatcgccatctcaggcatccagcgccgcatcctcggcttcctcaagcccgggttcagggatctccgaagcactcagagctggagcaactaagtccaaagagtttttattatatttagcggggtttgtcgatggggatgggagtataatagccagtataaaacccaggcaatgttataaatttaaacatgaattaaggttagaatttacggtcacgcaaaaaacccaacgtaggtggtttttagataaattagtggatgaaataggcgtcgggtatgtgtatgataggggcagcgtcagtgattataggttaagtcaaataaaaccgttacataattttttaacgcaattacaaccctttttaaaattaaaacaaaaacaagccaatttagtgttaaaaataatagaacaattaccgagcgcgaaagaaagtcccgataaatttttagaagtctgtacctgggtggaccaagtcgccgcgttaaatgattcaaaaacgaggaaaaccacgagcgaaaccgtcagagccgtgttagatagtttatcagaaaagaagaaaagcagtccg

SEQ ID NO: 44 - DNA, 1050 bp, artificial sequence
  LIG3-4(A6)
atgaacaccaagtacaacaaggagttcctgctctacctggccggcttcgtggacggcgacggctccatcaaggcgcagatcaagccgaaccagtcctgcaagttcaagcaccagctctccctgaccttccaggtgacccagaagacgcagaggcgctggttcctcgacaagctggtcgacgagatcggggtgggctacgtctacgaccgcgggtcggtgtccgactacgagctctcccagatcaagcccctgcacaacttcctcacccagctccagccgttcctcaagctgaagcagaagcaggcgaacctcgtcctgaagatcatcgagcagctcccctcggccaaggagtccccggacaagttcctggaggtgtgcacgtgggtcgaccaggtcgcggccctcaacgacagcaagacccgcaagacgacctcggagacggtgcgggcggtcctggactccctcccaggatccgtgggaggtctatcgccatctcaggcatccagcgccgcatcctcggcttcctcaagcccgggttcagggatctccgaagcactcagagctggagcaactaagtccaaagagtttttattatatttagcggggtttgtcgatggggatgggagtataatagccagtataaaacccaggcaatgttataaatttaaacatgaattaaggttagaatttacggtcacgcaaaaaacccaacgtaggtggtttttagataaattagtggatgaaataggcgtcgggtatgtgtatgataggggcagcgtcagtgattataggttaagtcaaataaaaccgttacataattttttaacgcaattacaaccctatttaaaattaaaacaaaaacaagccaatttagtgttaaaaataatagaacaattaccgagcgcgaaagaaagtcccgataaatttttagaagtctgtacctgggtggatcaaatagccgcgttaaatgattcaaaaacgaggaaaaccacgagcgaaaccgtcagagccgtgttagatagtttatcagaaaagaagaaaagcagtccg

SEQ ID NO: 45 - DNA, 1050 bp, artificial sequence
  LIG3-4(B1)
atgaacaccaagtacaacaaggagttcctgctctacctggccggcttcgtggacggcgacggctgtatcaaggcgcagatcaagccgaaccagtcctgcaagttcaagcaccagctctccctgaccttccaggtgacccagaagacgcagaggcgctggttcctcgacaagctggtcgacgagatcggggtgggctacgtctacgaccgcccatcggtgtccgactacgagctctcccagatcaagcccctgcacaacttcctcacccagctccagccgttcctcaagctgaagcagaagcaggcgaacctcgtcctgaagatcatcgagcagctcccctcggccaaggagtccccggacaagttcctggaggtgtgcacgtgggtcgaccagatcgcggccctcaacgacagcaagacccgcaagacgacctcggagacggtgcgggcggtcctggactccctcccaggatccgtgggaggtctatcgccatctcaggcatccagcgccgcatcctcggcttcctcaagcccgggttcagggatctccgaagcactcagagctggagcaactaagtccaaagagtttttattatatttagcggggtttgtcgatggggatgggagtataatagccagtataaaacccaggcaatgttataaatttaaacatgaattaaggttagaatttacggtcacgcaaaaaacccaacgtaggtggtttttagataaattagtggatgaaataggcgtcgggtatgtgtatgataggaaaagcgtcagtgattataggttaagtcaaataaaaccgttacataattttttaacgcaattacaaccctttttaaaattaaaacaaaaacaagccaatttagtgttaaaaataatagaacaattaccgagcgcgaaagaaagtcccgataaatttttagaagtctgtacctgggtggatcaaatagccgcgttaaatgattcaaaaacgaggaaaaccacgagcgaaaccgtcagagccgtgttagatagtttatcagaaaagaagaaaagcagtccg

SEQ ID NO: 46 - DNA, 1050 bp, artificial sequence
  LIG3-4(B15)
atgaacaccaagtacaacaaggagttcctgctctacctggccggcttcgtggacggcgacggctgtatcaaggcgcagatcaagccgaaccagtcctgcaagttcaagcaccagctctccctgaccttccaggtgacccagaagacgcaaaggcgctggttcctcgacaagctggtcgacgagatcggggtgggctacgtctacgaccgcgggtcggtgtccgactacgagctctcccagatcaagcccctgcacaacttcctcacccagctccagccgttcctcaagctgaagcagaagcaggcgaacctcgtcctgaagatcatcgagcagctcccctcggccaaggagtccccggacaagttcctggaggtgtgcacgtgggtcgaccagatcgcggccctcaacgacagcaagacccgcaagacgacctcggagacggtgcgggcggtcctggactccctcccaggatccgtgggaggtctatcgccatctcaggcatccagcgccgcatcctcggcttcctcaagcccgggttcagggatctccgaagcactcagagctggagcaactaagtccaaagagtttttattatatttagcggggtttgtcgatggggatgggagtataatagccagtataaaacccaggcaatgttataaatttaaacatgaattaaggttagaatttacggtcacgcaaaaaacccaacgtaggtggtttttagataaattagtggatgaaataggcgtcgggtatgtgtatgataggaaaagcgtcagtgattataggttaagtcaaataaaaccgttacataattttttaacgcaattacaaccctttttaaaattaaaacaaaaacaagccaatttagtgttaaaaataatagaacaattaccgagcgcgaaagaaagtcccgataaatttttagaagtctgtacctgggtggatcaaatagccgcgttaaatgattcaaaaacgaggaaaaccacgagcgaaaccgtcagagccgtgttagatagtttatcagaaaagaagaaaagcagtccg

SEQ ID NO: 47 - DNA, 1050 bp, artificial sequence
  LIG3-4(B16)
atgaacaccaagtacaacaaggagttcctgctctacctggccggcttcgtggacggcgacggctgtatcaaggcgcagatcaagccgaaccagtcctgcaagttcaagcaccagctctccctgaccttccaggtgacccagaagacgaaaaggcgctggttcctcgacaagctggtcgacgagatcggggtgggctacgtctacgaccgcgggtcggtgtccgactacgagctctcccagatcaagcccctgcacaacttcctcacccagctccagccgttcctcaagctgaagcagaagcaggcgaacctcgtcctgaagatcatcgagcagctcccctcggccaaggagtccccggacaagttcctggaggtgtgcacgtgggtcgaccagatcgcggccctcaacgacagcaagacccgcaagacgacctcggagacggtgcgggcggtcctggactccctcccaggatccgtgggaggtctatcgccatctcaggcatccagcgccgcatcctcggcttcctcaagcccgggttcagggatctccgaagcactcagagctggagcaactaagtccaaagagtttttattatatttagcggggtttgtcgatggggatgggagtataatagccagtataaaacccaggcaatgttataaatttaaacatgaattaaggttagaatttacggtcacgcaaaaaacccaacgtaggtggtttttagataaattagtggatgaaataggcgtcgggtatgtgtatgataggggcagcgtcagtgattataggttaagtcaaataaaaccgttacataattttttaacgcaattacaaccctttttaaaattaaaacaaaaacaagccaatttagtgttaaaaataatagaacaattaccgagcgcgaaagaaagtcccgataaatttttagaagtctgtacctgggtggatcaaatagccgcgttaaatgattcaaaaacgaggaaaaccacgagcgaaaccgtcagagccgtgttagatagtttatcagaaaagaagaaaagcagtccg

SEQ ID NO: 48 - DNA, 1050 bp, artificial sequence
  LIG3-4(B24)
atgaacaccaagtacaacaaggagttcctgctctacctggccggcttcgtggacggcgacggctgtatcaaggcgcagatcaagccgaaccagtcctgcaagttcaagcaccagctctccctgaccttccaggtgacccagaagacgcaaaggcgctggttcctcgacaagctggtcgacgagatcggggtgggctacgtctacgaccgcgggtcggtgtccgactacgagctctcccagatcaagcccctgcacaacttcctcacccagctccagccgttcctcaagctgaagcagaagcaggcgaacctcgtcctgaagatcatcgagcagctcccctcggccaaggagtccccggacaagttcctggaggtgtgcacgtgggtcgaccagatcgcggccctcaacgacagcaagacccgcaagacgacctcggagacggtgcgggcggtcctggactccctcccaggatccgtgggaggtctatcgccatctcaggcatccagcgccgcatcctcggcttcctcaagcccgggttcagggatctccgaagcactcagagctggagcaactaagtccaaagagtttttattatatttagcggggtttgtcgatggggatgggagtataatagccagtataaaacccaggcaatgttataaatttaaacatgaattaaggttagaatttacggtcacgcaaaaaacccaacgtaggtggtttttagataaattagtggatgaaataggcgtcgggtatgtgtatgataggggcagcgtcagtgattataggttaagtcaaataaaaccgttacataattttttaacgcaattacaaccctttttaaaattaaaacaaaaacaagccaatttagtgttaaaaataatagaacaattaccgagcgcgaaagaaagtcccgataaatttttagaagtctgtacctgggtggatcaaatagccgcgttaaatgattcaaaaacgaggaaaaccacgagcgaaaccgtcagagccgtgttagatagtttatcagaaaagaagaaaagcagtccg

SEQ ID NO: 49 - DNA, 1050 bp, artificial sequence
  LIG3-4(B36)
atgaacaccaagtacaacaaggagttcctgctctacctggccggcttcgtggacggcgacggctccatcaaggcgcagatcaagccgaaccagtcctgcaagttcaagcaccagctctccctgaccttccaggtgacccagaagacgcaaaggcgctggttcctcgacaagctggtcgacgagatcggggtgggctacgtctacgaccgcaagtcggtgtccgactacgagctctcccagatcaagcccctgcacaacttcctcacccagctccagccgttcctcaagctgaagcagaagcaggcgaacctcgtcctgaagatcatcgagcagctcccctcggccaaggagtccccggacaagttcctggaggtgtgcacgtgggtcgaccagatcgcggccctcaacgacagcaagacccgcaagacgacctcggagacggtgcgggcggtcctggactccctcccaggatccgtgggaggtctatcgccatctcaggcatccagcgccgcatcctcggcttcctcaagcccgggttcagggatctccgaagcactcagagctggagcaactaagtccaaagagtttttattatatttagcggggtttgtcgatggggatgggagtataatagccagtataaaacccaggcaatgttataaatttaaacatgaattaaggttagaatttacggtcacgcaaaaaacccaacgtaggtggtttttagataaattagtggatgaaataggcgtcgggtatgtgtatgataggaaaagcgtcagtgattataggttaagtcaaataaaaccgttacataattttttaacgcaattacaaccctttttaaaattaaaacaaaaacaagccaatttagtgttaaaaataatagaacaattaccgagcgcgaaagaaagtcccgataaatttttagaagtctgtacctgggtggatcaaatagccgcgttaaatgattcaaaaacgaggaaaaccacgagcgaaaccgtcagagccgtgttagatagtttatcagaaaagaagaaaagcagtccg

SEQ ID NO: 50 - DNA, 1050 bp, artificial sequence
  LIG3-4(B38)
atgaacaccaagtacaacaaggagttcctgctctacctggccggcttcgtggacggcgacggctgtatcaaggcgcagatcaagccgaaccagtcctgcaagttcaagcaccagctctccctgaccttccaggtgacccagaagacgcagaggcgctggttcctcgacaagctggtcgacgagatcggggtgggctacgtctacgaccgcgggtcggtgtccgactacgagctctcccagatcaagcccctgcacaacttcctcacccagctccagccgttcctcaagctgaagcagaagcaggcgaacctcgtcctgaagatcatcgagcagctcccctcggccaaggagtccccggacaagttcctggaggtgtgcacgtgggtcgaccagatcgcggccctcaacgacagcaagacccgcaagacgacctcggagacggtgcgggcggtcctggactccctcccaggatccgtgggaggtctatcgccatctcaggcatccagcgccgcatcctcggcttcctcaagcccgggttcagggatctccgaagcactcagagctggagcaactaagtccaaagagtttttattatatttagcggggtttgtcgatggggatgggagtataatagccagtataaaacccaggcaatgttataaatttaaacatgaattaaggttagaatttacggtcacgcaaaaaacccaacgtaggtggtttttagataaattagtggatgaaataggcgtcgggtatgtgtatgataggccaagcgtcagtgattataggttaagtcaaataaaaccgttacataattttttaacgcaattacaaccctttttaaaattaaaacaaaaacaagccaatttagtgttaaaaataatagaacaattaccgagcgcgaaagaaagtcccgataaatttttagaagtctgtacctgggtggatcaaatagccgcgttaaatgattcaaaaacgaggaaaaccacgagcgaaaccgtcagagccgtgttagatagtttatcagaaaagaagaaaagcagtccg

SEQ ID NO: 51 - DNA, 1050 bp, artificial sequence
  LIG3-4(B39)
atgaacaccaagtacaacaaggagttcctgctctacctggccggcttcgtggacggcgacggctgtatcaaggcgcagatcaagccgaaccagtcctgcaagttcaagcaccagctctccctgaccttccaggtgacccagaagacgcaaaggcgctggttcctcgacaagctggtcgacgagatcggggtgggctacgtctacgaccgcccatcggtgtccgactacgagctctcccagatcaagcccctgcacaacttcctcacccagctccagccgttcctcaagctgaagcagaagcaggcgaacctcgtcctgaagatcatcgagcagctcccctcggccaaggagtccccggacaagttcctggaggtgtgcacgtgggtcgaccagatcgcggccctcaacgacagcaagacccgcaagacgacctcggagacggtgcgggcggtcctggactccctcccaggatccgtgggaggtctatcgccatctcaggcatccagcgccgcatcctcggcttcctcaagcccgggttcagggatctccgaagcactcagagctggagcaactaagtccaaagagtttttattatatttagcggggtttgtcgatggggatgggagtataatagccagtataaaacccaggcaatgttataaatttaaacatgaattaaggttagaatttacggtcacgcaaaaaacccaacgtaggtggtttttagataaattagtggatgaaataggcgtcgggtatgtgtatgataggccaagcgtcagtgattataggttaagtcaaataaaaccgttacataattttttaacgcaattacaaccctttttaaaattaaaacaaaaacaagccaatttagtgttaaaaataatagaacaattaccgagcgcgaaagaaagtcccgataaatttttagaagtctgtacctgggtggatcaaatagccgcgttaaatgattcaaaaacgaggaaaaccacgagcgaaaccgtcagagccgtgttagatagtttatcagaaaataataaaagcagtccg

SEQ ID NO: 52 - DNA, 1050 bp, artificial sequence
  LIG3-4(B40)
atgaacaccaagtacaacaaggagttcctgctctacctggccggcttcgtggacggcgacggctccatcaaggcgcagatcaagccgaaccagtcctgcaagttcaagcaccagctctccctgaccttccaggtgacccagaagacgaaaaggcgctggttcctcgacaagctggtcgacgagatcggggtgggctacgtctacgaccgcgggtcggtgtccgactacgagctctcccagatcaagcccctgcacaacttcctcacccagctccagccgttcctcaagctgaagcagaagcaggcgaacctcgtcctgaagatcatcgagcagctcccctcggccaaggagtccccggacaagttcctggaggtgtgcacgtgggtcgaccagatcgcggccctcaacgacagcaagacccgcaagacgacctcggagacggtgcgggcggtcctggactccctcccaggatccgtgggaggtctatcgccatctcaggcatccagcgccgcatcctcggcttcctcaagcccgggttcagggatctccgaagcactcagagctggagcaactaagtccaaagagtttttattatatttagcggggtttgtcgatggggatgggagtataatagccagtataaaacccaggcaatgttataaatttaaacatgaattaaggttagaatttacggtcacgcaaaaaacccaacgtaggtggtttttagataaattagtggatgaaataggcgtcgggtatgtgtatgataggaaaagcgtcagtgattataggttaagtcaaataaaaccgttacataattttttaacgcaattacaaccctttttaaaattaaaacaaaaacaagccaatttagtgttaaaaataatagaacaattaccgagcgcgaaagaaagtcccgataaatttttagaagtctgtacctgggtggatcaaatagccgcgttaaatgattcaaaaacgaggaaaaccacgagcgaaaccgtcagagccgtgttagatagtttatcagaaaagaagaaaagcagtccg

SEQ ID NO: 53 - DNA, 1050 bp, artificial sequence
  LIG3-4(B55)
atgaacaccaagtacaacaaggagttcctgctctacctggccggcttcgtggacggcgacggctgtatcaaggcgcagatcaagccgaaccagtcctgcaagttcaagcaccagctctccctgaccttccaggtgacccagaagacgcaaaggcgctggttcctcgacaagctggtcgacgagatcggggtgggctacgtctacgaccgcgggtcggtgtccgactacgagctctcccagatcaagcccctgcacaacttcctcacccagctccagccgttcctcaagctgaagcagaagcaggcgaacctcgtcctgaagatcatcgagcagctcccctcggccaaggagtccccggacaagttcctggaggtgtgcacgtgggtcgaccagatcgcggccctcaacgacagcaagacccgcaagacgacctcggagacggtgcgggcggtcctggactccctcccaggatccgtgggaggtctatcgccatctcaggcatccagcgccgcatcctcggcttcctcaagcccgggttcagggatctccgaagcactcagagctggagcaactaagtccaaagagtttttattatatttagcggggtttgtcgatggggatgggtgcataatagccagtataaaacccaggcaatgttataaatttaaacatgaattaaggttagaatttacggtcacgcaaaaaacccaacgtaggtggtttttagataaattagtggatgaaataggcgtcgggtatgtgtatgataggaaaagcgtcagtgattataggttaagtcaaataaaaccgttacataattttttaacgcaattacaaccctttttaaaattaaaacaaaaacaagccaatttagtgttaaaaataatagaacaattaccgagcgcgaaagaaagtcccgataaatttttagaagtctgtacctgggtggatcaaatagccgcgttaaatgattcaaaaacgaggaaaaccacgagcgaaaccgtcagagccgtgttagatagtttatcagaaaagaagaaaagcagtccg

SEQ ID NO: 54 - DNA, 1050 bp, artificial sequence
  LIG3-4(B65)
atgaacaccaagtacaacaaggagttcctgctctacctggccggcttcgtggacggcgacggctgtatcaaggcgcagatcaagccgaaccagtcctgcaagttcaagcaccagctctccctgaccttccaggtgacccagaagacgaaaaggcgctggttcctcgacaagctggtcgacgagatcggggtgggctacgtctacgaccgcaagtcggtgtccgactacgagctctcccagatcaagcccctgcacaacttcctcacccagctccagccgttcctcaagctgaagcagaagcaggcgaacctcgtcctgaagatcatcgagcagctcccctcggccaaggagtccccggacaagttcctggaggtgtgcacgtgggtcgaccagatcgcggccctcaacgacagcaagacccgcaagacgacctcggagacggtgcgggcggtcctggactccctcccaggatccgtgggaggtctatcgccatctcaggcatccagcgccgcatcctcggcttcctcaagcccgggttcagggatctccgaagcactcagagctggagcaactaagtccaaagagtttttattatatttagcggggtttgtcgatggggatgggagtataatagccagtataaaacccaggcaatgttataaatttaaacatgaattaaggttagaatttacggtcacgcaaaaaacccagcgtcgttggtttttagataaattagtggatgaaataggcgtcgggtatgtgtatgataggaaaagcgtcagtgattataggttaagtcaaataaaaccgttacataattttttaacgcaattacaaccctttttaaaattaaaacaaaaacaagccaatttagtgttaaaaataatagaacaattaccgagcgcgaaagaaagtcccgataaatttttagaagtctgtacctgggtggatcaaatagccgcgttaaatgattcaaaaacgaggaaaaccacgagcgaaaccgtcagagccgtgttagatagtttatcagaaaagaagaaaagcagtccg

SEQ ID NO: 55 - DNA, 1050 bp, artificial sequence
  LIG3-4(B70)
atgaacaccaagtacaacaaggagttcctgctctacctggccggcttcgtggacggcgacggctgtatcaaggcgcagatcaagccgaaccagtcctgcaagttcaagcaccagctctccctgaccttccaggtgacccagaagacgaaaaggcgctggttcctcgacaagctggtcgacgagatcggggtgggctacgtctacgaccgcaagtcggtgtccgactacgagctctcccagatcaagcccctgcacaacttcctcacccagctccagccgttcctcaagctgaagcagaagcaggcgaacctcgtcctgaagatcatcgagcagctcccctcggccaaggagtccccggacaagttcctggaggtgtgcacgtgggtcgaccagatcgcggccctcaacgacagcaagacccgcaagacgacctcggagacggtgcgggcggtcctggactccctcccaggatccgtgggaggtctatcgccatctcaggcatccagcgccgcatcctcggcttcctcaagcccgggttcagggatctccgaagcactcagagctggagcaactaagtccaaagagtttttattatatttagcggggtttgtcgatggggatgggagtataatagccagtataaaacccaggcaatgttataaatttaaacatgaattaaggttagaatttacggtcacgcaaaaaacccaacgtaggtggtttttagataaattagtggatgaaataggcgtcgggtatgtgtatgataggccaagcgtcagtgattataggttaagtcaaataaaaccgttacataattttttaacgcaattacaaccctttttaaaattaaaacaaaaacaagccaatttagtgttaaaaataatagaacaattaccgagcgcgaaagaaagtcccgataaatttttagaagtctgtacctgggtggatcaaatagccgcgttaaatgattcaaaaacgaggaaaaccacgagcgaaaccgtcagagccgtgttagatagtttatcagaaaagaagaaaagcagtccg

SEQ ID NO: 56 - DNA, 1050 bp, artificial sequence
  LIG3-4(B71)
atgaacaccaagtacaacaaggagttcctgctctacctggccggcttcgtggacggcgacggctgtatcaaggcgcagatcaagccgaaccagtcctgcaagttcaagcaccagctctccctgaccttccaggtgacccagaagacgcagaggcgctggttcctcgacaagctggtcgacgagatcggggtgggctacgtctacgaccgcaagtcggtgtccgactacgagctctcccagatcaagcccctgcacaacttcctcacccagctccagccgttcctcaagctgaagcagaagcaggcgaacctcgtcctgaagatcatcgagcagctcccctcggccaaggagtccccggacaagttcctggaggtgtgcacgtgggtcgaccagatcgcggccctcaacgacagcaagacccgcaagacgacctcggagacggtgcgggcggtcctggactccctcccaggatccgtgggaggtctatcgccatctcaggcatccagcgccgcatcctcggcttcctcaagcccgggttcagggatctccgaagcactcagagctggagcaactaagtccaaagagtttttattatatttagcggggtttgtcgatggggatgggagtataatagccagtataaaacccaggcaatgttataaatttaaacatgaattaaggttagaatttacggtcacgcaaaaaacccaacgtaggtggtttttagataaattagtggatgaaataggcgtcgggtatgtgtatgataggccaagcgtcagtgattataggttaagtcaaataaaaccgttacataattttttaacgcaattacaaccctttttaaaattaaaacaaaaacaagccaatttagtgttaaaaataatagaacaattaccgagcgcgaaagaaagtcccgataaatttttagaagtctgtacctgggtggatcaaatagccgcgttaaatgattcaaaaacgaggaaaaccacgagcgaaaccgtcagagccgtgttagatagtttatcagaaaagaagaaaagcagtccg

SEQ ID NO: 57 - DNA, 1050 bp, artificial sequence
  LIG3-4(B73)
atgaacaccaagtacaacaaggagttcctgctctacctggccggcttcgtggacggcgacggctgtatcaaggcgcagatcaagccgaaccagtcctgcaagttcaagcaccagctctccctgaccttccaggtgacccagaagacgcagaggcgctggttcctcgacaagctggtcgacgagatcggggtgggctacgtctacgaccgcaagtcggtgtccgactacgagctctcccagatcaagcccctgcacaacttcctcacccagctccagccgttcctcaagctgaagcagaagcaggcgaacctcgtcctgaagatcatcgagcagctcccctcggccaaggagtccccggacaagttcctggaggtgtgcacgtgggtcgaccagatcgcggccctcaacgacagcaagacccgcaagacgacctcggagacggtgcgggcggtcctggactccctcccaggatccgtgggaggtctatcgccatctcaggcatccagcgccgcatcctcggcttcctcaagcccgggttcagggatctccgaagcactcagagctggagcaactaagtccaaagagtttttattatatttagcggggtttgtcgatggggatgggagtataatagccagtataaaacccaggcaatgttataaatttaaacatgaattaaggttagaatttacggtcacgcaaaaaacccaacgtaggtggtttttagataaattagtggatgaaataggcgtcgggtatgtgtatgataggaaaagcgtcagtgattataggttaagtcaaataaaaccgttacataattttttaacgcaattacaaccctttttaaaattaaaacaaaaacaagccaatttagtgttaaaaataatagaacaattaccgagcgcgaaagaaagtcccgataaatttttagaagtctgtacctgggtggatcaaatagccgcgttaaatgattcaaaaacgaggaaaaccacgagcgaaaccgtcagagccgtgttagatagtttatcagaaaagaagaaaagcagtccg

SEQ ID NO: 58 - DNA, 1050 bp, artificial sequence
  LIG3-4(B75)
atgaacaccaagtacaacaaggagttcctgctctacctggccggcttcgtggacggcgacggctgtatcaaggcgcagatcaagccgaaccagtcctgcaagttcaagcaccagctctccctgaccttccaggtgacccagaagacgaaaaggcgctggttcctcgacaagctggtcgacgagatcggggtgggctacgtctacgaccgcccatcggtgtccgactacgagctctcccagatcaagcccctgcacaacttcctcacccagctccagccgttcctcaagctgaagcagaagcaggcgaacctcgtcctgaagatcatcgagcagctcccctcggccaaggagtccccggacaagttcctggaggtgtgcacgtgggtcgaccagatcgcggccctcaacgacagcaagacccgcaagacgacctcggagacggtgcgggcggtcctggactccctcccaggatccgtgggaggtctatcgccatctcaggcatccagcgccgcatcctcggcttcctcaagcccgggttcagggatctccgaagcactcagagctggagcaactaagtccaaagagtttttattatatttagcggggtttgtcgatggggatgggagtataatagccagtataaaacccaggcaatgttataaatttaaacatgaattaaggttagaatttacggtcacgcaaaaaacccaacgtaggtggtttttagataaattagtggatgaaataggcgtcgggtatgtgtatgataggaaaagcgtcagtgattataggttaagtcaaataaaaccgttacataattttttaacgcaattacaaccctttttaaaattaaaacaaaaacaagccaatttagtgttaaaaataatagaacaattaccgagcgcgaaagaaagtcccgataaatttttagaagtctgtacctgggtggatcaaatagccgcgttaaatgattcaaaaacgaggaaaaccacgagcgaaaccgtcagagccgtgttagatagtttatcagaaaagaagaaaagcagtccg

SEQ ID NO: 59 - DNA, 1050 bp, artificial sequence
  LIG3-4(B76)
atgaacaccaagtacaacaaggagttcctgctctacctggccggcttcgtggacggcgacggctgtatcaaggcgcagatcaagccgaaccagtcctgcaagttcaagcaccagctctccctgaccttccaggtgacccagaagacgaaaaggcgctggttcctcgacaagctggtcgacgagatcggggtgggctacgtctacgaccgcgggtcggtgtccgactacgagctctcccagatcaagcccctgcacaacttcctcacccagctccagccgttcctcaagctgaagcagaagcaggcgaacctcgtcctgaagatcatcgagcagctcccctcggccaaggagtccccggacaagttcctggaggtgtgcacgtgggtcgaccagatcgcggccctcaacgacagcaagacccgcaagacgacctcggagacggtgcgggcggtcctggactccctcccaggatccgtgggaggtctatcgccatctcaggcatccagcgccgcatcctcggcttcctcaagcccgggttcagggatctccgaagcactcagagctggagcaactaagtccaaagagtttttattatatttagcggggtttgtcgatggggatgggagtataatagccagtataaaacccaggcaatgttataaatttaaacatgaattaaggttagaatttacggtcacgcaaaaaacccaacgtaggtggtttttagataaattagtggatgaaataggcgtcgggtatgtgtatgataggaaaagcgtcagtgattataggttaagtcaaataaaaccgttacataattttttaacgcaattacaaccctttttaaaattaaaacaaaaacaagccaatttagtgttaaaaataatagaacaattaccgagcgcgaaagaaagtcccgataaatttttagaagtctgtacctgggtggatcaaatagccgcgttaaatgattcaaaaacgaggaaaaccacgagcgaaaccgtcagagccgtgttagatagtttatcagaaaagaagaaaagcagtccg

SEQ ID NO: 60 - DNA, 1050 bp, artificial sequence
  LIG3-4(B78)
atgaacaccaagtacaacaaggagttcctgctctacctggccggcttcgtggacggcgacggctgtatcaaggcgcagatcaagccgaaccagtcctgcaagttcaagcaccagctctccctgaccttccaggtgacccagaagacgcagaggcgctggttcctcgacaagctggtcgacgagatcggggtgggctacgtctacgaccgcccatcggtgtccgactacgagctctcccagatcaagcccctgcacaacttcctcacccagctccagccgttcctcaagctgaagcagaagcaggcgaacctcgtcctgaagatcatcgagcagctcccctcggccaaggagtccccggacaagttcctggaggtgtgcacgtgggtcgaccagatcgcggccctcaacgacagcaagacccgcaagacgacctcggagacggtgcgggcggtcctggactccctcccaggatccgtgggaggtctatcgccatctcaggcatccagcgccgcatcctcggcttcctcaagcccgggttcagggatctccgaagcactcagagctggagcaactaagtccaaagagtttttattatatttagcggggtttgtcgatggggatgggagtataatagccagtataaaacccaggcaatgttataaatttaaacatgaattaaggttagaatttacggtcacgcaaaaaacccaacgtaggtggtttttagataaattagtggatgaaataggcgtcgggtatgtgtatgataggaaaagcgtcagtgattataggttaagtcaaataaaaccgttacataattttttaacgcaattacaaccctttttaaaattaaaacaaaaacaagccaatttagtgttaaaaataatagaacaattaccgagcgcgaaagaaagtcccgataaatttttagaagtctgtacctgggtggatcaaatagccgcgttaaatgattcaaaaacgaggaaaaccacgagcgaaaccgtcagagccgtgttagatagtttatcagaaaataataaaagcagtccg

SEQ ID NO: 61 - DNA, 1050 bp, artificial sequence
  LIG3-4(B82)
atgaacaccaagtacaacaaggagttcctgctctacctggccggcttcgtggacggcgacggctgtatcaaggcgcagatcaagccgaaccagtcctgcaagttcaagcaccagctctccctgaccttccaggtgacccagaagacgaaaaggcgctggttcctcgacaagctggtcgacgagatcggggtgggctacgtctacgaccgcaagtcggtgtccgactacgagctctcccagatcaagcccctgcacaacttcctcacccagctccagccgttcctcaagctgaagcagaagcaggcgaacctcgtcctgaagatcatcgagcagctcccctcggccaaggagtccccggacaagttcctggaggtgtgcacgtgggtcgaccagatcgcggccctcaacgacagcaagacccgcaagacgacctcggagacggtgcgggcggtcctggactccctcccaggatccgtgggaggtctatcgccatctcaggcatccagcgccgcatcctcggcttcctcaagcccgggttcagggatctccgaagcactcagagctggagcaactaagtccaaagagtttttattatatttagcggggtttgtcgatggggatgggtgcataatagccagtataaaacccaggcaatgttataaatttaaacatgaattaaggttagaatttacggtcacgcaaaaaacccaacgtaggtggtttttagataaattagtggatgaaataggcgtcgggtatgtgtatgataggaaaagcgtcagtgattataggttaagtcaaataaaaccgttacataattttttaacgcaattacaaccctttttaaaattaaaacaaaaacaagccaatttagtgttaaaaataatagaacaattaccgagcgcgaaagaaagtcccgataaatttttagaagtctgtacctgggtggatcaaatagccgcgttaaatgattcaaaaacgaggaaaaccacgagcgaaaccgtcagagccgtgttagatagtttatcagaaaagaagaaaagcagtccg

SEQ ID NO: 62 - DNA, 1050 bp, artificial sequence
  LIG3-4(C1)
atgaacaccaagtacaacaaggagttcctgctctacctggccggcttcgtggacggcgacggctgtatcaaggcgcagatcaagccgaaccagtcctgcaagttcaagcaccagctctccctgaccttccaggtgacccagaagacgcaaaggcgctggttcctcgacaagctggtcgacgagatcggggtgggctacgtctacgaccgcaagtcggtgtccgactacgagctctcccagatcaagcccctgcacaacttcctcacccagctccagccgttcctcaagctgaagcagaagcaggcgaacctcgtcctgaagatcatcgagcagctcccctcggccaaggagtccccggacaagttcctggaggtgtgcacgtgggtcgaccagatcgcggccctcaacgacagcaagacccgcaagacgacctcggagacggtgcgggcggtcctggactccctcccaggatccgtgggaggtctatcgccatctcaggcatccagcgccgcatcctcggcttcctcaagcccgggttcagggatctccgaagcactcagagctggagcaactaagtccaaagagtttttattatatttagcggggtttgtcgatggggatgggagtataatagccagtataaaacccaggcaatgttataaattgaaacatgaattaaggttagaatttacggtcacgcaaaaaacccaacgtaggtggtttttagataaattagtggatgaaataggcgtcgggtatgtgtatgataggggcagcgtcagtgattataggttaagtcaaataaaaccgttacataattttttaacgcaattacaaccctttttaaaattaaaacaaaaacaagccaatttagtgttaaaaataatagaacaattaccgagcgcgaaagaaagtcccgataaatttttagaagtctgtacctgggtggatcaaatagccgcgttaaatgattcaaaaacgaggaaaaccacgagcgaaaccgtcagagccgtgttagatagtttatcagaaaataataaaagcagtccg

SEQ ID NO: 63 - DNA, 1050 bp, artificial sequence
  LIG3-4(D5)
atgaacaccaagtacaacaaggagttcctgctctacctggccggcttcgtggacggcgacggctccatcaaggcgcagatcaagccgaaccagtcctgcaagttcaagcaccagctctccctgaccttccaggtgacccagaagacgcagaggcgctggttcctcgacaagctggtcgacgagatcggggtgggctacgtctacgaccgcgggtcggtgtccgactacgagctctcccagaaaaagcccctgcacaacttcctcacccagctccagccgttcctcaagctgaagcagaagcaggcggtcctcgtcctgaagatcatcgagcagctcccctcggccaaggagtccccggacaagttcctggaggtgtgcacgtgggtcgaccagatcgcggccctcaacgacagcaagacccgcaagacgacctcggagacggtgcgggcggtcctgatgtccctcccaggatccgtgggaggtctatcgccatctcaggcatccagcgccgcatcctcggcttcctcaagcccgggttcagggatctccgaagcactcagagctggagcaactaagtccaaagagtttttattatatttagcggggtttgtcgatggggatgggagtataatagccagtataaaacccaggcaatgttataaatttaaacatgaattaaggttagaatttacggtcacgcaaaaaacccaacgtaggtggtttttagataaattacacgatgaaataggcgtcgggtatgtgtatgataggggcagcgtcagtgattataggttaagtcaaatcaaaccgttacataattttttaacgcaattacaaccctttttaaaattaaaacaaaaacaagccaatttagtgttaaaaataatagaacaattaccgagcgcgaaagaaagtcccgatggatttttagaagtctgtacctgggtggatcaaatagccgcgttaaatgattcaaaaacgaggaaaaccacgagcgaaaccgtcagagccgtgttagatagtttatcagaaaagaagaaaagcagtccg

SEQ ID NO: 64 - DNA, 1050 bp, artificial sequence
  LIG3-4(D7)
atgaacaccaagtacaacaaggagttcctgctctacctggccggcttcgtggacggcgacggctccatcaaggcgcagatcaagccgaaccagtcctgcaagttcaagcaccagctctccctgaccttccaggtgacccagaagacgcggaggcgctggttcctcctgaagctggtcgacgagatcggggtgggctacgtctacgaccgcgggtcggtgtccgactacgagctctcccagaaaaagccgctgcacaacttcctcacccagctccagccgttcctcaagctgaagcagaagcaggcgaacctcgtcctgaagatcatcgagcagctcccctcggccaaggagtccccggacaaattcctggaggtgtgcacgtgggtcgaccagatcgcggccctcaacgacagcaagacccgcaagacgacctcggagacggtgcgggcggtcctgttgtccctcccaggatccgtgggaggtctatcgccatctcaggcatccagcgccgcatcctcggcttcctcaagcccgggttcagggatctccgaagcactcagagctggagcaactaagtccaaagagtttttattatatttagcggggtttgtcgatggggatgggagtataatagccagtataaaacccaggcaatgttataaatttaaacatgaattaaggttagaatttacggtcacgcaaaaaacccaacgtaggtggtttttagataaattagtggatgaaataggcgtcgggtatgtgtatgataggggcagcgtcagtgattataggttaagtcaaataaaaccgttacataattttttaacgcaattacaaccctttttaaaattaaaacaaaaacaagccaatttagtgttaaaaataatagaacaattaccgagcgcgaaagaaagtcccgataaatttttagaagtctgtacctgggtggatcaaatagccgcgttaaatgattcaaaaacgaggaaaaccacgagcgaaaccgtcagagccgtgttagatagtttatcagaaaagaagaaaagcagtccg

SEQ ID NO: 65 - DNA, 1050 bp, artificial sequence
  LIG3-4(D8)
atgaacaccaagtacaacaaggagttcctgctctacctggccggcttcgtggacggcgacggctccatcaaggcgcagatcaagccgaaccagtcctgcaagttcaagcaccagctctccctgaccttccaggtgacccagaagacgcagaggcgctggatcctcgacaagctgcacgacgagatcggggtgggctacgtctacgaccgcgggtcggtgtccgactacgagctctcccagatcaagcccctgcacaacttcctcacccagctccagccgttcctcaagctgaagcagaagcaggcgaacctcgtcctgaagatcatcgagcagctcccctcggccaaggagtccccggacggcttcctggaggtgtgcacgtgggtcgaccagatcgcggccctcaacgacagcaagacccgcaagacgacctcggagacggtgcgggcggtcctggactccctcccaggatccgtgggaggtctatcgccatctcaggcatccagcgccgcatcctcggcttcctcaagcccgggttcagggatctccgaagcactcagagctggagcaactaagtccaaagagtttttattatatttagcggggtttgtcgatggggatgggagtataatagccagtataaaacccaggcaatgttataaatttaaacatgaattaaggttagaatttacggtcacgcaaaaaacccaacgtaggtggtttttagataaattagtggatgaaataggcgtcgggtatgtgtatgataggggcagcgtcagtgattataggttaagtcaaataaaaccgttacataattttttaacgcaattacaaccctttttaaaattaaaacaaaaacaagccaatttagtgttaaaaataatagaacaattaccgagcgcgaaagaaagtcccgataaatttttagaagtctgtacctgggtggatcaaatagccgcgttaaatgattcaaaaacgaggaaaaccacgagcgaaaccgtcagagccgtgttagatagtttatcagaaaagaagaaaagcagtccg

SEQ ID NO: 66 - DNA, 67 bp, artificial sequence
  MN031 primer
aaaaactatatctagacatatggccccgaagaagaagcgcaaggtgatgaacaccaagtacaacaag

SEQ ID NO: 67 - DNA, 40 bp, artificial sequence
  MN022 primer
aattacatgactcgagttaatggtgatggtgatggtgagg

SEQ ID NO: 68 - DNA, 7753 bp, artificial sequence
  pVER8134  (with LIG34=500-1549)
tgaagtacggattagaagccgccgagcgggtgacagccctccgaaggaagactctcctccgtgcgtcctcgtcttcaccggtcgcgttcctgaaacgcagatgtgcctcgcgccgcactgctccgaacaataaagattctacaatactagcttttatggttatgaagaggaaaaattggcagtaacctggccccacaaaccttcaaatgaacgaatcaaattaacaaccataggatgataatgcgattagttttttagccttatttctggggtaattaatcagcgaagcgatgatttttgatctattaacagatatataaatgcaaaaactgcataaccactttaactaatactttcaacattttcggtttgtattacttcttattcaaatgtaataaaagtatcaacaaaaaattgttaatatacctctatactttaacgtcaaggagaaaaaaccccggattctagacatatggccccgaagaagaagcgcaaggtgatgaacaccaagtacaacaaggagttcctgctctacctggccggcttcgtggacggcgacggctccatcaaggcgcagatcaagccgaaccagtcctgcaagttcaagcaccagctctccctgaccttccaggtgacccagaagacgcagaggcgctggttcctcgacaagctggtcgacgagatcggggtgggctacgtctacgaccgcgggtcggtgtccgactacgagctctcccagatcaagcccctgcacaacttcctcacccagctccagccgttcctcaagctgaagcagaagcaggcgaacctcgtcctgaagatcatcgagcagctcccctcggccaaggagtccccggacaagttcctggaggtgtgcacgtgggtcgaccagatcgcggccctcaacgacagcaagacccgcaagacgacctcggagacggtgcgggcggtcctggactccctcccaggatccgtgggaggtctatcgccatctcaggcatccagcgccgcatcctcggcttcctcaagcccgggttcagggatctccgaagcactcagagctggagcaactaagtccaaggaattcctgctctacctggccggcttcgtggacggcgacggctccatcatcgcgtccatcaagccgcgccagtgctacaagttcaagcacgagctccgcctggagttcaccgtgacccagaagacgcagaggcgctggttcctcgacaagctggtcgacgagatcggggtgggctacgtctacgaccgcgggtcggtgtccgactaccgcctctcccagatcaagcccctgcacaacttcctcacccagctccagccgttcctcaagctgaagcagaagcaggcgaacctcgtcctgaagatcatcgagcagctcccctcggccaaggagtccccggacaagttcctggaggtgtgcacgtgggtcgaccagatcgcggccctcaacgacagcaagacccgcaagacgacctcggagacggtgcgggcggtcctggactccctcagcgagaagaagaagtcgtctcctcaccatcaccatcaccattaactcgagtcatgtaattagttatgtcacgcttacattcacgccctccccccacatccgctctaaccgaaaaggaaggagttagacaacctgaagtctaggtccctatttatttttttatagttatgttagtattaagaacgttatttatatttcaaatttttcttttttttctgtacagacgcgtgtacgcatgtaacattatactgaaaaccttgcttgagaaggttttgggacgctcgaaggctttaatttgcggccggtacccaattcgccctatagtgagtcgtattacgcgcgctcactggccgtcgttttacaacgtcgtgactgggaaaaccctggcgttacccaacttaatcgccttgcagcacatccccctttcgccagctggcgtaatagcgaagaggcccgcaccgatcgcccttcccaacagttgcgcagcctgaatggcgaatggcgcgacgcgccctgtagcggcgcattaagcgcggcgggtgtggtggttacgcgcagcgtgaccgctacacttgccagcgccctagcgcccgctcctttcgctttcttcccttcctttctcgccacgttcgccggctttccccgtcaagctctaaatcgggggctccctttagggttccgatttagtgctttacggcacctcgaccccaaaaaacttgattagggtgatggttcacgtagtgggccatcgccctgatagacggtttttcgccctttgacgttggagtccacgttctttaatagtggactcttgttccaaactggaacaacactcaaccctatctcggtctattcttttgatttataagggattttgccgatttcggcctattggttaaaaaatgagctgatttaacaaaaatttaacgcgaattttaacaaaatattaacgtttacaatttcctgatgcggtattttctccttacgcatctgtgcggtatttcacaccgcatatcgacggtcgaggagaacttctagtatatccacatacctaatattattgccttattaaaaatggaatcccaacaattacatcaaaatccacattctcttcaaaatcaattgtcctgtacttccttgttcatgtgtgttcaaaaacgttatatttataggataattatactctatttctcaacaagtaattggttgtttggccgagcggtctaaggcgcctgattcaagaaatatcttgaccgcagttaactgtgggaatactcaggtatcgtaagatgcaagagttcgaatctcttagcaaccattatttttttcctcaacataacgagaacacacaggggcgctatcgcacagaatcaaattcgatgactggaaattttttgttaatttcagaggtcgcctgacgcatatacctttttcaactgaaaaattgggagaaaaaggaaaggtgagaggccggaaccggcttttcatatagaatagagaagcgttcatgactaaatgcttgcatcacaatacttgaagttgacaatattatttaaggacctattgttttttccaataggtggttagcaatcgtcttactttctaacttttcttaccttttacatttcagcaatatatatatatatttcaaggatataccattctaatgtctgcccctatgtctgcccctaagaagatcgtcgttttgccaggtgaccacgttggtcaagaaatcacagccgaagccattaaggttcttaaagctatttctgatgttcgttccaatgtcaagttcgatttcgaaaatcatttaattggtggtgctgctatcgatgctacaggtgtcccacttccagatgaggcgctggaagcctccaagaaggttgatgccgttttgttaggtgctgtgggtggtcctaaatggggtaccggtagtgttagacctgaacaaggtttactaaaaatccgtaaagaacttcaattgtacgccaacttaagaccatgtaactttgcatccgactctcttttagacttatctccaatcaagccacaatttgctaaaggtactgacttcgttgttgtcagagaattagtgggaggtatttactttggtaagagaaaggaagacgatggtgatggtgtcgcttgggatagtgaacaatacaccgttccagaagtgcaaagaatcacaagaatggccgctttcatggccctacaacatgagccaccattgcctatttggtccttggataaagctaatgttttggcctcttcaagattatggagaaaaactgtggaggaaaccatcaagaacgaattccctacattgaaggttcaacatcaattgattgattctgccgccatgatcctagttaagaacccaacccacctaaatggtattataatcaccagcaacatgtttggtgatatcatctccgatgaagcctccgttatcccaggttccttgggtttgttgccatctgcgtccttggcctctttgccagacaagaacaccgcatttggtttgtacgaaccatgccacggttctgctccagatttgccaaagaataaggttgaccctatcgccactatcttgtctgctgcaatgatgttgaaattgtcattgaacttgcctgaagaaggtaaggccattgaagatgcagttaaaaaggttttggatgcaggtatcagaactggtgatttaggtggttccaacagtaccaccgaagtcggtgatgctgtcgccgaagaagttaagaaaatccttgcttaaaaagattctctttttttatgatatttgtacataaactttataaatgaaattcataatagaaacgacacgaaattacaaaatggaatatgttcatagggtagacgaaactatatacgcaatctacatacatttatcaagaaggagaaaaaggaggatagtaaaggaatacaggtaagcaaattgatactaatggctcaacgtgataaggaaaaagaattgcactttaacattaatattgacaaggaggagggcaccacacaaaaagttaggtgtaacagaaaatcatgaaactacgattcctaatttgatattggaggattttctctaaaaaaaaaaaaatacaacaaataaaaaacactcaatgacctgaccatttgatggagtttaagtcaataccttcttgaaccatttcccataatggtgaaagttccctcaagaattttactctgtcagaaacggccttacgacgtagtcgatatggtgcactctcagtacaatctgctctgatgccgcatagttaagccagccccgacacccgccaacacccgctgacgcgccctgacgggcttgtctgctcccggcatccgcttacagacaagctgtgaccgtctccgggagctgcatgtgtcagaggttttcaccgtcatcaccgaaacgcgcgagacgaaagggcctcgtgatacgcctatttttataggttaatgtcatgataataatggtttcttaggacggatcgcttgcctgtaacttacacgcgcctcgtatcttttaatgatggaataatttgggaatttactctgtgtttatttatttttatgttttgtatttggattttagaaagtaaataaagaaggtagaagagttacggaatgaagaaaaaaaaataaacaaaggtttaaaaaatttcaacaaaaagcgtactttacatatatatttattagacaagaaaagcagattaaatagatatacattcgattaacgataagtaaaatgtaaaatcacaggattttcgtgtgtggtcttctacacagacaagatgaaacaattcggcattaatacctgagagcaggaagagcaagataaaaggtagtatttgttggcgatccccctagagtcttttacatcttcggaaaacaaaaactattttttctttaatttctttttttactttctatttttaatttatatatttatattaaaaaatttaaattataattatttttatagcacgtgatgaaaaggacccaggtggcacttttcggggaaatgtgcgcggaacccctatttgtttatttttctaaatacattcaaatatgtatccgctcatgagacaataaccctgataaatgcttcaataatattgaaaaaggaagagtatgagtattcaacatttccgtgtcgcccttattcccttttttgcggcattttgccttcctgtttttgctcacccagaaacgctggtgaaagtaaaagatgctgaagatcagttgggtgcacgagtgggttacatcgaactggatctcaacagcggtaagatccttgagagttttcgccccgaagaacgttttccaatgatgagcacttttaaagttctgctatgtggcgcggtattatcccgtattgacgccgggcaagagcaactcggtcgccgcatacactattctcagaatgacttggttgagtactcaccagtcacagaaaagcatcttacggatggcatgacagtaagagaattatgcagtgctgccataaccatgagtgataacactgcggccaacttacttctgacaacgatcggaggaccgaaggagctaaccgcttttttgcacaacatgggggatcatgtaactcgccttgatcgttgggaaccggagctgaatgaagccataccaaacgacgagcgtgacaccacgatgcctgtagcaatggcaacaacgttgcgcaaactattaactggcgaactacttactctagcttcccggcaacaattaatagactggatggaggcggataaagttgcaggaccacttctgcgctcggcccttccggctggctggtttattgctgataaatctggagccggtgagcgtgggtctcgcggtatcattgcagcactggggccagatggtaagccctcccgtatcgtagttatctacacgacggggagtcaggcaactatggatgaacgaaatagacagatcgctgagataggtgcctcactgattaagcattggtaactgtcagaccaagtttactcatatatactttagattgatttaaaacttcatttttaatttaaaaggatctaggtgaagatcctttttgataatctcatgaccaaaatcccttaacgtgagttttcgttccactgagcgtcagaccccgtagaaaagatcaaaggatcttcttgagatcctttttttctgcgcgtaatctgctgcttgcaaacaaaaaaaccaccgctaccagcggtggtttgtttgccggatcaagagctaccaactctttttccgaaggtaactggcttcagcagagcgcagataccaaatactgtccttctagtgtagccgtagttaggccaccacttcaagaactctgtagcaccgcctacatacctcgctctgctaatcctgttaccagtggctgctgccagtggcgataagtcgtgtcttaccgggttggactcaagacgatagttaccggataaggcgcagcggtcgggctgaacggggggttcgtgcacacagcccagcttggagcgaacgacctacaccgaactgagatacctacagcgtgagctatgagaaagcgccacgcttcccgaagggagaaaggcggacaggtatccggtaagcggcagggtcggaacaggagagcgcacgagggagcttccagggggaaacgcctggtatctttatagtcctgtcgggtttcgccacctctgacttgagcgtcgatttttgtgatgctcgtcaggggggcggagcctatggaaaaacgccagcaacgcggcctttttacggttcctggccttttgctggccttttgctcacatgttctttcctgcgttatcccctgattctgtggataaccgtattaccgcctttgagtgagctgataccgctcgccgcagccgaacgaccgagcgcagcgagtcagtgagcgaggaagcggaagagcgcccaatacgcaaaccgcctctccccgcgcgttggccgattcattaatgcagctggcacgacaggtttcccgactggaaagcgggcagtgagcgcaacgcaattaatgtgagttacctcactcattaggcaccccaggctttacactttatgcttccggctcctatgttgtgtggaattgtgagcggataacaatttcacacaggaaacagctatgaccatgattacgccaagcgcgcaattaaccctcactaaagggaacaaaagctggagctc

SEQ ID NO: 69 - DNA, 27 bp, artificial sequence
  nuclear localization signal yeast
atggccccgaagaagaagcgcaaggtg

SEQ ID NO: 70 - protein, 9 aa, artificial sequence
  nuclear localization signal
MAPKKKRKV

SEQ ID NO: 71 - protein, 6 aa, artificial sequence
  6X histidine tag
HHHHHH

SEQ ID NO: 72 - DNA, 30 bp, artificial sequence
  nuclear localization signal maize
atggccccgaagaagaagcgcaaggtgatc

SEQ ID NO: 73 - DNA, 1269 bp, artificial sequence
  LIG3-4(7) maize (include NLS and ST-LS1 INTRON2)
atggcaccgaagaagaagcgcaaggtgatcatgaacaccaagtacaacaaggagttcctgctctacctggccggcatcgtggacggcgacggatccatcaaggcgcagatcaagccgaaccagtcctgcaagttcaagcaccagctctccctgaccttccaggtgacccagaagacgcagaggcgctggttcctcgacaagctggtcgacgagatcggggtgggctacgtctacgaccgcgggtcggtgtccgactacgagctctcccagatcaagcccctgcacaacttcctcacccagctgcagccgttcctcaagctgaagcagaagcaggcgaacctcgtcctgaagatcatcgagcagctcccctcggccaaggagtccccggacaagttcctggaggtaagtttctgcttctacctttgatatatatataataattatcattaattagtagtaatataatatttcaaatatttttttcaaaataaaagaatgtagtatatagcaattgcttttctgtagtttataagtgtgtatattttaatttataacttttctaatatatgaccaaaacatggtgatgtgcaggtgtgcacgtgggtcgaccagatcgcggccctcaacgacagcaagacccgcaagacgacctcggagacggtgcgggcggtcctggactccctcccaggatccgtgggaggtctatcgccatctcaggcatccagcgccgcatcctcggcttcctcaagcccgggttcagggatctccgaaggactcagagctggagcaactaagtccaaggaattcctgctctacctggccggcttcgtggacggcgacggctccatcatcgcgtccatcaagccgcgccagtgctacaagttcaagcacgagctccgcctggagttcaccgtgacccagaagacgcagaggcgctggttcctcgacgagctggtcgacgagatcggggtgggctacgtctacgaccgcgggtcggtgtccgactaccgcctctcccagatcaagcccctgcacaacttcctcacccagctccagccgttcctcaagcttaagcagaagcaggcgaacctcgtcctgaagatcatcgagcagctcccctcggccaaggagtccccggacaagttcctggaggtgtgcacgtgggcggaccagatcgcggccctcaacgacagcaagacccgcaagacgacctcggagacggtgcgggcggttctagactccctcagcgagaagaagaagtcgtccccc

SEQ ID NO: 74 - DNA, 1269 bp, artificial sequence
  LIG3-4(15) maize (include NLS and ST-LS1 INTRON2)
atggcaccgaagaagaagcgcaaggtgatcatgaacaccaagtacaacaaggagttcctgctctacctggccggcttcgtggactccgacggatccatcaaggcgcagatcaagccgaaccagtcctgcaagttcaagcaccagctctccctgaccttccaggtgacccagaagacgcagaggcgctggttcctcgacaagctggtcgacgagatcggggtgggctacgtctacgaccgcgggtcggtgtccgactacgagctctcccagatcaagcccctgcacaacttcctcacccagctgcagccgttcctcaagctgaagcagaagcaggcgaacctcgtcctgaagatcatcgagcagctcccctcggccaaggagtccccggacaagttcctggaggtaagtttctgcttctacctttgatatatatataataattatcattaattagtagtaatataatatttcaaatatttttttcaaaataaaagaatgtagtatatagcaattgcttttctgtagtttataagtgtgtatattttaatttataacttttctaatatatgaccaaaacatggtgatgtgcaggtgtgcacgtgggtcgaccagatcgcggccctcaacgacagcaagacccgcaagacgacctcggagacggtgcgggcggtcctggactccctcccaggatccgtgggaggtctatcgccatctcaggcatccagcgccgcatcctcggcttcctcaagcccgggttcagggatctccgaagcactcagagctggagcaactaagtccaaggaattcctgctctacctggccggcttcgtggacggcgacggctccatcatcgcgtccatcaagccgcgccagtgctacaagttcaagcacgagctccgcctggagttcaccgtgacccagaagacgcagaggcgctggttcctcgacaagctggtcgacgagatcggggtgggctacgtctacgaccgcgggtcggtgtccgactaccgcctctcccagatcaagcccctgcacaacttcctcacccagctccagccgttcctcaagcttaagcagaagcaggcgaacctcgtcctgaagatcatcgagcagctcccctcggccaaggagtccccggacaagttcctggaggtgtgcacgtgggtcgaccagatcgcggccctcaacgacagcaagacccgcaagacgacctcggagacggtgcgggcggttctagactccctcagcgagaagaagaagtcgtccccc

SEQ ID NO: 75 - DNA, 1269 bp, artificial sequence
  LIG3-4(B65) maize (include NLS and ST-LS1 INTRON2)
atggcaccgaagaagaagcgcaaggtgatcatgaacaccaagtacaacaaggagttcctgctctacctggccggcttcgtggacggcgacggatgcatcaaggcgcagatcaagccgaaccagtcctgcaagttcaagcaccagctctccctgaccttccaggtgacccagaagacgaagaggcgctggttcctcgacaagctggtcgacgagatcggggtgggctacgtctacgaccgcaagtcggtgtccgactacgagctctcccagatcaagcccctgcacaacttcctcacccagctgcagccgttcctcaagctgaagcagaagcaggcgaacctcgtcctgaagatcatcgagcagctcccctcggccaaggagtccccggacaagttcctggaggtaagtttctgcttctacctttgatatatatataataattatcattaattagtagtaatataatatttcaaatatttttttcaaaataaaagaatgtagtatatagcaattgcttttctgtagtttataagtgtgtatattttaatttataacttttctaatatatgaccaaaacatggtgatgtgcaggtgtgcacgtgggtcgaccagatcgcggccctcaacgacagcaagacccgcaagacgacctcggagacggtgcgggcggtcctggactccctcccaggatccgtgggaggtctatcgccatctcaggcatccagcgccgcatcctcggcttcctcaagcccgggttcagggatctccgaagcactcagagctggagcaactaagtccaaggaattcctgctctacctggccggcttcgtggacggcgacggctccatcatcgcgtccatcaagccgcgccagtgctacaagttcaagcacgagctccgcctggagttcaccgtgacccagaagacgcagaggcgctggttcctcgacaagctggtcgacgagatcggggtgggctacgtctacgaccgcaagtcggtgtccgactaccgcctctcccagatcaagcccctgcacaacttcctcacccagctccagccgttcctcaagcttaagcagaagcaggcgaacctcgtcctgaagatcatcgagcagctcccctcggccaaggagtccccggacaagttcctggaggtgtgcacgtgggtcgaccagatcgcggccctcaacgacagcaagacccgcaagacgacctcggagacggtgcgggcggttctagactccctcagcgagaagaagaagtcgtccccc

SEQ ID NO: 76 - DNA, 15979 bp, artificial sequence
  plasmid PHP46961
gtttacccgccaatatatcctgtcaaacactgatagtttaaactgaaggcgggaaacgacaatctgatcatgagcggagaattaagggagtcacgttatgacccccgccgatgacgcgggacaagccgttttacgtttggaactgacagaaccgcaacgttgaaggagccactcagcaagctggtacgattgtaatacgactcactatagggcgaattgagcgctgtttaaacgctcttcaactggaagagcggttactaccggctggatggcggggccttgatcgtgcaccgccggcgtccggactaactaactagtcgagctagttaccctatgaggtgacatgaagcgctcacggttactatgacggttagcttcacgactgttggtggcagtagcgtacgacttagctatagttccggacttacccttaagataacttcgtatagcatacattatacgaagttatgggcccaccggtggtacctggcgaaagggggatgtgctgcaaggcgattaagttgggtaacgccagggttttcccagtcacgacgttgtaaaacgacggccagtgaattgtaatacgactcactatagggcgaattgggttacccggaccgaagcttgcatgcctgcagtgcagcgtgacccggtcgtgcccctctctagagataatgagcattgcatgtctaagttataaaaaattaccacatattttttttgtcacacttgtttgaagtgcagtttatctatctttatacatatatttaaactttactctacgaataatataatctatagtactacaataatatcagtgttttagagaatcatataaatgaacagttagacatggtctaaaggacaattgagtattttgacaacaggactctacagttttatctttttagtgtgcatgtgttctcctttttttttgcaaatagcttcacctatataatacttcatccattttattagtacatccatttagggtttagggttaatggtttttatagactaatttttttagtacatctattttattctattttagcctctaaattaagaaaactaaaactctattttagtttttttatttaataatttagatataaaatagaataaaataaagtgactaaaaattaaacaaataccctttaagaaattaaaaaaactaaggaaacatttttcttgtttcgagtagataatgccagcctgttaaacgccgtcgacgagtctaacggacaccaaccagcgaaccagcagcgtcgcgtcgggccaagcgaagcagacggcacggcatctctgtcgctgcctctggacccctctcgagagttccgctccaccgttggacttgctccgctgtcggcatccagaaattgcgtggcggagcggcagacgtgagccggcacggcaggcggcctcctcctcctctcacggcaccggcagctacgggggattcctttcccaccgctccttcgctttcccttcctcgcccgccgtaataaatagacaccccctccacaccctctttccccaacctcgtgttgttcggagcgcacacacacacaaccagatctcccccaaatccacccgtcggcacctccgcttcaaggtacgccgctcgtcctcccccccccccctctctaccttctctagatcggcgttccggtccatgcatggttagggcccggtagttctacttctgttcatgtttgtgttagatccgtgtttgtgttagatccgtgctgctagcgttcgtacacggatgcgacctgtacgtcagacacgttctgattgctaacttgccagtgtttctctttggggaatcctgggatggctctagccgttccgcagacgggatcgatttcatgattttttttgtttcgttgcatagggtttggtttgcccttttcctttatttcaatatatgccgtgcacttgtttgtcgggtcatcttttcatgcttttttttgtcttggttgtgatgatgtggtctggttgggcggtcgttctagatcggagtagaattctgtttcaaactacctggtggatttattaattttggatctgtatgtgtgtgccatacatattcatagttacgaattgaagatgatggatggaaatatcgatctaggataggtatacatgttgatgcgggttttactgatgcatatacagagatgctttttgttcgcttggttgtgatgatgtggtgtggttgggcggtcgttcattcgttctagatcggagtagaatactgtttcaaactacctggtgtatttattaattttggaactgtatgtgtgtgtcatacatcttcatagttacgagtttaagatggatggaaatatcgatctaggataggtatacatgttgatgtgggttttactgatgcatatacatgatggcatatgcagcatctattcatatgctctaaccttgagtacctatctattataataaacaagtatgttttataattattttgatcttgatatacttggatgatggcatatgcagcagctatatgtggatttttttagccctgccttcatacgctatttatttgcttggtactgtttcttttgtcgatgctcaccctgttgtttggtgttacttctgcaggtcgactctagaggatccatggcaccgaagaagaagcgcaaggtgatcatgaacaccaagtacaacaaggagttcctgctctacctggccggcttcgtggactccgacggatccatcaaggcgcagatcaagccgaaccagtcctgcaagttcaagcaccagctctccctgaccttccaggtgacccagaagacgcagaggcgctggttcctcgacaagctggtcgacgagatcggggtgggctacgtctacgaccgcgggtcggtgtccgactacgagctctcccagatcaagcccctgcacaacttcctcacccagctgcagccgttcctcaagctgaagcagaagcaggcgaacctcgtcctgaagatcatcgagcagctcccctcggccaaggagtccccggacaagttcctggaggtaagtttctgcttctacctttgatatatatataataattatcattaattagtagtaatataatatttcaaatatttttttcaaaataaaagaatgtagtatatagcaattgcttttctgtagtttataagtgtgtatattttaatttataacttttctaatatatgaccaaaacatggtgatgtgcaggtgtgcacgtgggtcgaccagatcgcggccctcaacgacagcaagacccgcaagacgacctcggagacggtgcgggcggtcctggactccctcccaggatccgtgggaggtctatcgccatctcaggcatccagcgccgcatcctcggcttcctcaagcccgggttcagggatctccgaagcactcagagctggagcaactaagtccaaggaattcctgctctacctggccggcttcgtggacggcgacggctccatcatcgcgtccatcaagccgcgccagtgctacaagttcaagcacgagctccgcctggagttcaccgtgacccagaagacgcagaggcgctggttcctcgacaagctggtcgacgagatcggggtgggctacgtctacgaccgcgggtcggtgtccgactaccgcctctcccagatcaagcccctgcacaacttcctcacccagctccagccgttcctcaagcttaagcagaagcaggcgaacctcgtcctgaagatcatcgagcagctcccctcggccaaggagtccccggacaagttcctggaggtgtgcacgtgggtcgaccagatcgcggccctcaacgacagcaagacccgcaagacgacctcggagacggtgcgggcggttctagactccctcagcgagaagaagaagtcgtccccctgaggtaccacatggttaacctagacttgtccatcttctggattggccaacttaattaatgtatgaaataaaaggatgcacacatagtgacatgctaatcactataatgtgggcatcaaagttgtgtgttatgtgtaattactagttatctgaataaaagagaaagagatcatccatatttcttatcctaaatgaatgtcacgtgtctttataattctttgatgaaccagatgcatttcattaaccaaatccatatacatataaatattaatcatatataattaatatcaattgggttagcaaaacaaatctagtctaggtgtgttttgcgaatgcggccgcgttggacggcacgacgtagggggggaactcgtcgcggccgttggcggcagccgataggttcatcatcttcccacgccccggccggcacgttgacacgatatctcgatcgatcggtcggcccggccgcccgatctgtgcaggtgcaggtcgcgcgggcgggcgcggctagctgggagcctgggaggggaggaggggccggagggagcaggagcaggagtgcccgcgcgcgcacacacgagcacacggaaatggatgcgtaggggacggaggggaggacggcggcaaggacagcgcttagcggagagctcggtggagatcgatcgctcagtcggtcgcaggtggacgagcgacagacagagctaatacggcggtgttggccggccgggccatggtgtgggtgatggcgatgacacagatatatgcgcgggcgggcgccagctagtagccgggcagctagcgcgcgcccttctcggccggccggatctcttttgctgcggagagggagagggcgagagcgagggccgagagcgcgagtacttttggtctagggttccatggaacgagtggtggtggagtgagttttgggctatatctaagagcgacgcccgcagctcagctagcaacaaaccgggcgctggcactgacagggccggccagtagagagagagagagagatctttaattggagttggtgagtggtgatagcagccgcagctgctgctgctgctgctgctgcttctttgtggttggtttggttcgccctccatttttcctcacccgggagtccgtatgctatctgctatatgctaggctggctgtgggtgtctatgtatgtatcctcctcctccgttgaaacaacgtagcgtacgacactgctgcatgtgtggccttgaagatatgagtatctatgcatgatgcggatgctgtacatgtgcattgcatcgctcttctctctccctgcggtggtgtgtacgagacggtgggtacgtacgctaacgctagcagctgcctcccgcgtgacgccaggggcagcccggccggacgcggtgtttcgttccatgaccatgaggcgtgatctcagtcatggcccaactacgccaggggcttgcattgcccgcgcgcgtagactttgcacctgcgcatgtatgtatgtacatcctgcagcgcacagcagactgagctgtattcccgcgcaaatgagtagcagcgcacgtatatatacgcgtacgcgtacaagggcgaattccgctagcctgcagtgcagcgtgacccggtcgtgcccctctctagagataatgagcattgcatgtctaagttataaaaaattaccacatattttttttgtcacacttgtttgaagtgcagtttatctatctttatacatatatttaaactttactctacgaataatataatctatagtactacaataatatcagtgttttagagaatcatataaatgaacagttagacatggtctaaaggacaattgagtattttgacaacaggactctacagttttatctttttagtgtgcatgtgttctcctttttttttgcaaatagcttcacctatataatacttcatccattttattagtacatccatttagggtttagggttaatggtttttatagactaatttttttagtacatctattttattctattttagcctctaaattaagaaaactaaaactctattttagtttttttatttaataatttagatataaaatagaataaaataaagtgactaaaaattaaacaaataccctttaagaaattaaaaaaactaaggaaacatttttcttgtttcgagtagataatgccagcctgttaaacgccgtcgacgagtctaacggacaccaaccagcgaaccagcagcgtcgcgtcgggccaagcgaagcagacggcacggcatctctgtcgctgcctctggacccctctcgagagttccgctccaccgttggacttgctccgctgtcggcatccagaaattgcgtggcggagcggcagacgtgagccggcacggcaggcggcctcctcctcctctcacggcaccggcagctacgggggattcctttcccaccgctccttcgctttcccttcctcgcccgccgtaataaatagacaccccctccacaccctctttccccaacctcgtgttgttcggagcgcacacacacacaaccagatctcccccaaatccacccgtcggcacctccgcttcaaggtacgccgctcgtcctcccccccccccctctctaccttctctagatcggcgttccggtccatgcatggttagggcccggtagttctacttctgttcatgtttgtgttagatccgtgtttgtgttagatccgtgctgctagcgttcgtacacggatgcgacctgtacgtcagacacgttctgattgctaacttgccagtgtttctctttggggaatcctgggatggctctagccgttccgcagacgggatcgatttcatgattttttttgtttcgttgcatagggtttggtttgcccttttcctttatttcaatatatgccgtgcacttgtttgtcgggtcatcttttcatgcttttttttgtcttggttgtgatgatgtggtctggttgggcggtcgttctagatcggagtagaattctgtttcaaactacctggtggatttattaattttggatctgtatgtgtgtgccatacatattcatagttacgaattgaagatgatggatggaaatatcgatctaggataggtatacatgttgatgcgggttttactgatgcatatacagagatgctttttgttcgcttggttgtgatgatgtggtgtggttgggcggtcgttcattcgttctagatcggagtagaatactgtttcaaactacctggtgtatttattaattttggaactgtatgtgtgtgtcatacatcttcatagttacgagtttaagatggatggaaatatcgatctaggataggtatacatgttgatgtgggttttactgatgcatatacatgatggcatatgcagcatctattcatatgctctaaccttgagtacctatctattataataaacaagtatgttttataattattttgatcttgatatacttggatgatggcatatgcagcagctatatgtggatttttttagccctgccttcatacgctatttatttgcttggtactgtttcttttgtcgatgctcaccctgttgtttggtgttacttctgcaggtcgactctagaggatcaattcgctagcgaagttcctattccgaagttcctattctctagaaagtataggaacttcagatccaccgggatccacacgacaccatgtcccccgagcgccgccccgtcgagatccgcccggccaccgccgccgacatggccgccgtgtgcgacatcgtgaaccactacatcgagacctccaccgtgaacttccgcaccgagccgcagaccccgcaggagtggatcgacgacctggagcgcctccaggaccgctacccgtggctcgtggccgaggtggagggcgtggtggccggcatcgcctacgccggcccgtggaaggcccgcaacgcctacgactggaccgtggagtccaccgtgtacgtgtcccaccgccaccagcgcctcggcctcggctccaccctctacacccacctcctcaagagcatggaggcccagggcttcaagtccgtggtggccgtgatcggcctcccgaacgacccgtccgtgcgcctccacgaggccctcggctacaccgcccgcggcaccctccgcgccgccggctacaagcacggcggctggcacgacgtcggcttctggcagcgcgacttcgagctgccggccccgccgcgcccggtgcgcccggtgacgcagatctgagtcgaaacctagacttgtccatcttctggattggccaacttaattaatgtatgaaataaaaggatgcacacatagtgacatgctaatcactataatgtgggcatcaaagttgtgtgttatgtgtaattactagttatctgaataaaagagaaagagatcatccatatttcttatcctaaatgaatgtcacgtgtctttataattctttgatgaaccagatgcatttcattaaccaaatccatatacatataaatattaatcatatataattaatatcaattgggttagcaaaacaaatctagtctaggtgtgttttgcgaatgcggccctagcgtatacgaagttcctattccgaagttcctattctccagaaagtataggaacttctgtacacctgagctgattccgatgacttcgtaggttcctagctcaagccgctcgtgtccaagcgtcacttacgattagctaatgattacggcatctaggaccgactagctaactaactagtacaattcgcccttgtgtgaggtatatatatcctccgccggggcacgtacggtacaattcccagcaggtgcgtaaatcgttacagtatattatttccgcagccgatcaaaagaagtttgcgcgtcgtcacggcactgacttctatttagggcggccagagtaggctagcctgctggaccctctgtgtcccgtctatctcattcattcactcatcagctggtgctctatttttctctccctaattaagctggtggaaatttcgtgcttttcgtttgcaccgtgtgccattggatcggatctgatatatatgcgcgcggccgtccgagaccttattactcgtcaccttcttcaacctaacccccccccccccccctttaatttgctagccctaactggcaccatatatcattttgcccacacataataaacgactcctttgccaactgcaccagtcacttggcaaacgactaattacactcggcaaaaggttttgtcgtgtgccacactcgtcaaagagctcttggtgaaacaaacgccggtaacgatctctttgctgagcgccaacatactcggcatagaaggtacattaacggcgggcatcatggtgatgggaaactacctttttgcctagtgtattgttttgccgaggagggtggtattcggcaaatcatatatttgccgagtgctcgctctcagcaaacgtgtgagcactcggcaaagagcgtgtctccagttgtgttgtcattatctattttttttaacctacggcatgccaccaccaaaggttttaattgtcaggaactttctgtattgtagttttaattatataagttgttctccatcaggacttcgaggtcatgttgtatgatcaatggaagaatctcaagacggactcaaagagtggactctcgtcatggattaaaggtgtatttactgcaaggaaaagtgcaggcaatattcagtactcgagagaatctacattttactcttagctcatcacctatgtgggataggtgaaggcgtgaagcactccgagtcttcttggctattcaaagtttccttttcactttgctttccttttggtgtattatagcacacagttttctatgggtcaagggcgaattgtagaattaattcattccgattaatcgtggcctcttgctcttcaggatgaagagctatgtttaaacgtgcaagcgctactagacaattcagtacattaaaaacgtccgcaatgtgttattaagttgtctaagcgtcaatttgtttacaccacaatatatcctgccaccagccagccaacagctccccgaccggcagctcggcacaaaatcaccactcgatacaggcagcccatcagtccgggacggcgtcagcgggagagccgttgtaaggcggcagactttgctcatgttaccgatgctattcggaagaacggcaactaagctgccgggtttgaaacacggatgatctcgcggagggtagcatgttgattgtaacgatgacagagcgttgctgcctgtgatcaaatatcatctccctcgcagagatccgaattatcagccttcttattcatttctcgcttaaccgtgacaggctgtcgatcttgagaactatgccgacataataggaaatcgctggataaagccgctgaggaagctgagtggcgctatttctttagaagtgaacgttgacgatcgtcgaccgtaccccgatgaattaattcggacgtacgttctgaacacagctggatacttacttgggcgattgtcatacatgacatcaacaatgtacccgtttgtgtaaccgtctcttggaggttcgtatgacactagtggttcccctcagcttgcgactagatgttgaggcctaacattttattagagagcaggctagttgcttagatacatgatcttcaggccgttatctgtcagggcaagcgaaaattggccatttatgacgaccaatgccccgcagaagctcccatctttgccgccatagacgccgcgccccccttttggggtgtagaacatccttttgccagatgtggaaaagaagttcgttgtcccattgttggcaatgacgtagtagccggcgaaagtgcgagacccatttgcgctatatataagcctacgatttccgttgcgactattgtcgtaattggatgaactattatcgtagttgctctcagagttgtcgtaatttgatggactattgtcgtaattgcttatggagttgtcgtagttgcttggagaaatgtcgtagttggatggggagtagtcatagggaagacgagcttcatccactaaaacaattggcaggtcagcaagtgcctgccccgatgccatcgcaagtacgaggcttagaaccaccttcaacagatcgcgcatagtcttccccagctctctaacgcttgagttaagccgcgccgcgaagcggcgtcggcttgaacgaattgttagacattatttgccgactaccttggtgatctcgcctttcacgtagtgaacaaattcttccaactgatctgcgcgcgaggccaagcgatcttcttgtccaagataagcctgcctagcttcaagtatgacgggctgatactgggccggcaggcgctccattgcccagtcggcagcgacatccttcggcgcgattttgccggttactgcgctgtaccaaatgcgggacaacgtaagcactacatttcgctcatcgccagcccagtcgggcggcgagttccatagcgttaaggtttcatttagcgcctcaaatagatcctgttcaggaaccggatcaaagagttcctccgccgctggacctaccaaggcaacgctatgttctcttgcttttgtcagcaagatagccagatcaatgtcgatcgtggctggctcgaagatacctgcaagaatgtcattgcgctgccattctccaaattgcagttcgcgcttagctggataacgccacggaatgatgtcgtcgtgcacaacaatggtgacttctacagcgcggagaatctcgctctctccaggggaagccgaagtttccaaaaggtcgttgatcaaagctcgccgcgttgtttcatcaagccttacagtcaccgtaaccagcaaatcaatatcactgtgtggcttcaggccgccatccactgcggagccgtacaaatgtacggccagcaacgtcggttcgagatggcgctcgatgacgccaactacctctgatagttgagtcgatacttcggcgatcaccgcttccctcatgatgtttaactcctgaattaagccgcgccgcgaagcggtgtcggcttgaatgaattgttaggcgtcatcctgtgctcccgagaaccagtaccagtacatcgctgtttcgttcgagacttgaggtctagttttatacgtgaacaggtcaatgccgccgagagtaaagccacattttgcgtacaaattgcaggcaggtacattgttcgtttgtgtctctaatcgtatgccaaggagctgtctgcttagtgcccactttttcgcaaattcgatgagactgtgcgcgactcctttgcctcggtgcgtgtgcgacacaacaatgtgttcgatagaggctagatcgttccatgttgagttgagttcaatcttcccgacaagctcttggtcgatgaatgcgccatagcaagcagagtcttcatcagagtcatcatccgagatgtaatccttccggtaggggctcacacttctggtagatagttcaaagccttggtcggataggtgcacatcgaacacttcacgaacaatgaaatggttctcagcatccaatgtttccgccacctgctcagggatcaccgaaatcttcatatgacgcctaacgcctggcacagcggatcgcaaacctggcgcggcttttggcacaaaaggcgtgacaggtttgcgaatccgttgctgccacttgttaacccttttgccagatttggtaactataatttatgttagaggcgaagtcttgggtaaaaactggcctaaaattgctggggatttcaggaaagtaaacatcaccttccggctcgatgtctattgtagatatatgtagtgtatctacttgatcgggggatctgctgcctcgcgcgtttcggtgatgacggtgaaaacctctgacacatgcagctcccggagacggtcacagcttgtctgtaagcggatgccgggagcagacaagcccgtcagggcgcgtcagcgggtgttggcgggtgtcggggcgcagccatgacccagtcacgtagcgatagcggagtgtatactggcttaactatgcggcatcagagcagattgtactgagagtgcaccatatgcggtgtgaaataccgcacagatgcgtaaggagaaaataccgcatcaggcgctcttccgcttcctcgctcactgactcgctgcgctcggtcgttcggctgcggcgagcggtatcagctcactcaaaggcggtaatacggttatccacagaatcaggggataacgcaggaaagaacatgtgagcaaaaggccagcaaaaggccaggaaccgtaaaaaggccgcgttgctggcgtttttccataggctccgcccccctgacgagcatcacaaaaatcgacgctcaagtcagaggtggcgaaacccgacaggactataaagataccaggcgtttccccctggaagctccctcgtgcgctctcctgttccgaccctgccgcttaccggatacctgtccgcctttctcccttcgggaagcgtggcgctttctcatagctcacgctgtaggtatctcagttcggtgtaggtcgttcgctccaagctgggctgtgtgcacgaaccccccgttcagcccgaccgctgcgccttatccggtaactatcgtcttgagtccaacccggtaagacacgacttatcgccactggcagcagccactggtaacaggattagcagagcgaggtatgtaggcggtgctacagagttcttgaagtggtggcctaactacggctacactagaaggacagtatttggtatctgcgctctgctgaagccagttaccttcggaaaaagagttggtagctcttgatccggcaaacaaaccaccgctggtagcggtggtttttttgtttgcaagcagcagattacgcgcagaaaaaaaggatctcaagaagatcctttgatcttttctacggggtctgacgctcagtggaacgaaaactcacgttaagggattttggtcatgagattatcaaaaaggatcttcacctagatccttttaaattaaaaatgaagttttaaatcaatctaaagtatatatgagtaaacttggtctgacagttaccaatgcttaatcagtgaggcacctatctcagcgatctgtctatttcgttcatccatagttgcctgactccccgtcgtgtagataactacgatacgggagggcttaccatctggccccagtgctgcaatgataccgcgagacccacgctcaccggctccagatttatcagcaataaaccagccagccggaagggccgagcgcagaagtggtcctgcaactttatccgcctccatccagtctattaattgttgccgggaagctagagtaagtagttcgccagttaatagtttgcgcaacgttgttgccattgctgcagggggggggggggggggggacttccattgttcattccacggacaaaaacagagaaaggaaacgacagaggccaaaaagcctcgctttcagcacctgtcgtttcctttcttttcagagggtattttaaataaaaacattaagttatgacgaagaagaacggaaacgccttaaaccggaaaattttcataaatagcgaaaacccgcgaggtcgccgccccgtaacctgtcggatcaccggaaaggacccgtaaagtgataatgattatcatctacatatcacaacgtgcgtggaggccatcaaaccacgtcaaataatcaattatgacgcaggtatcgtattaattgatctgcatcaacttaacgtaaaaacaacttcagacaatacaaatcagcgacactgaatacggggcaacctcatgtcccccccccccccccccctgcaggcatcgtggtgtcacgctcgtcgtttggtatggcttcattcagctccggttcccaacgatcaaggcgagttacatgatcccccatgttgtgcaaaaaagcggttagctccttcggtcctccgatcgttgtcagaagtaagttggccgcagtgttatcactcatggttatggcagcactgcataattctcttactgtcatgccatccgtaagatgcttttctgtgactggtgagtactcaaccaagtcattctgagaatagtgtatgcggcgaccgagttgctcttgcccggcgtcaacacgggataataccgcgccacatagcagaactttaaaagtgctcatcattggaaaacgttcttcggggcgaaaactctcaaggatcttaccgctgttgagatccagttcgatgtaacccactcgtgcacccaactgatcttcagcatcttttactttcaccagcgtttctgggtgagcaaaaacaggaaggcaaaatgccgcaaaaaagggaataagggcgacacggaaatgttgaatactcatactcttcctttttcaatattattgaagcatttatcagggttattgtctcatgagcggatacatatttgaatgtatttagaaaaataaacaaataggggttccgcgcacatttccccgaaaagtgccacctgacgtctaagaaaccattattatcatgacattaacctataaaaataggcgtatcacgaggccctttcgtcttcaagaattggtcgacgatcttgctgcgttcggatattttcgtggagttcccgccacagacccggattgaaggcgagatccagcaactcgcgccagatcatcctgtgacggaactttggcgcgtgatgactggccaggacgtcggccgaaagagcgacaagcagatcacgcttttcgacagcgtcggatttgcgatcgaggatttttcggcgctgcgctacgtccgcgaccgcgttgagggatcaagccacagcagcccactcgaccttctagccgacccagacgagccaagggatctttttggaatgctgctccgtcgtcaggctttccgacgtttgggtggttgaacagaagtcattatcgtacggaatgccaagcactcccgaggggaaccctgtggttggcatgcacatacaaatggacgaacggataaaccttttcacgcccttttaaatatccgttattctaataaacgctcttttctcttag

SEQ ID NO: 77 - DNA, 1097 bp, artificial sequence
  LIG3-4(HR1)
gtgtgaggtatatatatcctccgccggggcacgtacggtacaattcccagcaggtgcgtaaatcgttacagtatattatttccgcagccgatcaaaagaagtttgcgcgtcgtcacggcactgacttctatttagggcggccagagtaggctagcctgctggaccctctgtgtcccgtctatctcattcattcactcatcagctggtgctctatttttctctccctaattaagctggtggaaatttcgtgcttttcgtttgcaccgtgtgccattggatcggatctgatatatatgcgcgcggccgtccgagaccttattactcgtcaccttcttcaacctaacccccccccccccccctttaatttgctagccctaactggcaccatatatcattttgcccacacataataaacgactcctttgccaactgcaccagtcacttggcaaacgactaattacactcggcaaaaggttttgtcgtgtgccacactcgtcaaagagctcttggtgaaacaaacgccggtaacgatctctttgctgagcgccaacatactcggcatagaaggtacattaacggcgggcatcatggtgatgggaaactacctttttgcctagtgtattgttttgccgaggagggtggtattcggcaaatcatatatttgccgagtgctcgctctcagcaaacgtgtgagcactcggcaaagagcgtgtctccagttgtgttgtcattatctattttttttaacctacggcatgccaccaccaaaggttttaattgtcaggaactttctgtattgtagttttaattatataagttgttctccatcaggacttcgaggtcatgttgtatgatcaatggaagaatctcaagacggactcaaagagtggactctcgtcatggattaaaggtgtatttactgcaaggaaaagtgcaggcaatattcagtactcgagagaatctacattttactcttagctcatcacctatgtgggataggtgaaggcgtgaagcactccgagtcttcttggctattcaaagtttccttttcactttgctttccttttggtgtattatagcacacagttttctatggg

SEQ ID NO: 78 - DNA, 1242 bp, artificial sequence
  LIG3-4(HR2)
gcggccgcgttggacggcacgacgtagggggggaactcgtcgcggccgttggcggcagccgataggttcatcatcttcccacgccccggccggcacgttgacacgatatctcgatcgatcggtcggcccggccgcccgatctgtgcaggtgcaggtcgcgcgggcgggcgcggctagctgggagcctgggaggggaggaggggccggagggagcaggagcaggagtgcccgcgcgcgcacacacgagcacacggaaatggatgcgtaggggacggaggggaggacggcggcaaggacagcgcttagcggagagctcggtggagatcgatcgctcagtcggtcgcaggtggacgagcgacagacagagctaatacggcggtgttggccggccgggccatggtgtgggtgatggcgatgacacagatatatgcgcgggcgggcgccagctagtagccgggcagctagcgcgcgcccttctcggccggccggatctcttttgctgcggagagggagagggcgagagcgagggccgagagcgcgagtacttttggtctagggttccatggaacgagtggtggtggagtgagttttgggctatatctaagagcgacgcccgcagctcagctagcaacaaaccgggcgctggcactgacagggccggccagtagagagagagagagagatctttaattggagttggtgagtggtgatagcagccgcagctgctgctgctgctgctgctgcttctttgtggttggtttggttcgccctccatttttcctcacccgggagtccgtatgctatctgctatatgctaggctggctgtgggtgtctatgtatgtatcctcctcctccgttgaaacaacgtagcgtacgacactgctgcatgtgtggccttgaagatatgagtatctatgcatgatgcggatgctgtacatgtgcattgcatcgctcttctctctccctgcggtggtgtgtacgagacggtgggtacgtacgctaacgctagcagctgcctcccgcgtgacgccaggggcagcccggccggacgcggtgtttcgttccatgaccatgaggcgtgatctcagtcatggcccaactacgccaggggcttgcattgcccgcgcgcgtagactttgcacctgcgcatgtatgtatgtacatcctgcagcgcacagcagactgagctgtattcccgcgcaaatgagtagcagcgcacgtatatatacgcgtacgcgtac

SEQ ID NO: 79 - DNA, 18 bp, artificial sequence
  LIG3-4 target site qPCR probe
atacctcacacgtacgcg

SEQ ID NO: 80 - DNA, 20 bp, artificial sequence
  Lig3-4_forward primer
gatttacgcacctgctggga

SEQ ID NO: 81 - DNA, 20 bp, artificial sequence
  Lig3-4_reverse primer
ctgagctgtattcccgcgca

SEQ ID NO: 82 - DNA, 3716 bp, Saccharomyces cerevisiae
ctactagaaagaagggcgtcaaaaatctgctatgctattacgaaattactctataggttagaatgtcatcccataggtatggcccttttaaagaagtatctccacaatcaattgcgagaagcctatctagaatcaaaacgacactttatttccaaaaagggagattcgaccaacacttcctctaccattgcatcatcatctttcgctggcgcatctgttcctctatcttcaaacgaatcaggaatgctaaacggcttgaagcaaattaacgaacaacaagaatctacattagaaaccactcaaaaggaagactagtaacgccgtatcgtgattaacgtattacataagttacaggattcatgcttatgggttagctatttcgcccaatgtgtccatctgacattactattttgcattttaatttaattagaacttgactagcgcactaccagtatatcatctcatttccgtaaataccaaatgtattatatattgaaagcttttgaccaggttattataaaagaaacttcatgctcgaaaaagatcatttcgaaaagttgcctagtttcatgaaattttaaagcagtttatataaattttaccttttgatgcggaattgactttttcttgaataatacataacttttcttaaaagaatcaaagacagataaaatttaagagatattaaatattagtgagaagccgagaattttgtaacaccaacataacactgacatctttaacaacttttaattatgatacatttcttacgtcatgattgattattacagctatgctgacaaatgactcttgttgcatggctacgaaccgggtaatactaagtgattgactcttgctgaccttttattaagaactaaatggacaatattatggagcatttcatgtataaattggtgcgtaaaatcgttggatctctcttctaagtacatcctactataacaatcaagaaaaacaagaaaatcggacaaaacaatcaagtatggattctagaacagttggtatattaggagggggacaattgggacgtatgattgttgaggcagcaaacaggctcaacattaagacggtaatactagatgctgaaaattctcctgccaaacaaataagcaactccaatgaccacgttaatggctccttttccaatcctcttgatatcgaaaaactagctgaaaaatgtgatgtgctaacgattgagattgagcatgttgatgttcctacactaaagaatcttcaagtaaaacatcccaaattaaaaatttacccttctccagaaacaatcagattgatacaagacaaatatattcaaaaagagcatttaatcaaaaatggtatagcagttacccaaagtgttcctgtggaacaagccagtgagacgtccctattgaatgttggaagagatttgggttttccattcgtcttgaagtcgaggactttggcatacgatggaagaggtaacttcgttgtaaagaataaggaaatgattccggaagctttggaagtactgaaggatcgtcctttgtacgccgaaaaatgggcaccatttactaaagaattagcagtcatgattgtgagatctgttaacggtttagtgttttcttacccaattgtagagactatccacaaggacaatatttgtgacttatgttatgcgcctgctagagttccggactccgttcaacttaaggcgaagttgttggcagaaaatgcaatcaaatcttttcccggttgtggtatatttggtgtggaaatgttctatttagaaacaggggaattgcttattaacgaaattgccccaaggcctcacaactctggacattataccattgatgcttgcgtcacttctcaatttgaagctcatttgagatcaatattggatttgccaatgccaaagaatttcacatctttctccaccattacaacgaacgccattatgctaaatgttcttggagacaaacatacaaaagataaagagctagaaacttgcgaaagagcattggcgactccaggttcctcagtgtacttatatggaaaagagtctagacctaacagaaaagtaggtcacataaatattattgcctccagtatggcggaatgtgaacaaaggctgaactacattacaggtagaactgatattccaatcaaaatctctgtcgctcaaaagttggacttggaagcaatggtcaaaccattggttggaatcatcatgggatcagactctgacttgccggtaatgtctgccgcatgtgcggttttaaaagattttggcgttccatttgaagtgacaatagtctctgctcatagaactccacataggatgtcagcatatgctatttccgcaagcaagcgtggaattaaaacaattatcgctggagctggtggggctgctcacttgccaggtatggtggctgcaatgacaccacttcctgtcatcggtgtgcccgtaaaaggttcttgtctagatggagtagattctttacattcaattgtgcaaatgcctagaggtgttccagtagctaccgtcgctattaataatagtacgaacgctgcgctgttggctgtcagactgcttggcgcttatgattcaagttatacaacgaaaatggaacagtttttattaaagcaagaagaagaagttcttgtcaaagcacaaaagttagaaactgtcggttacgaagcttatctagaaaacaagtaatatataagtttattgatatacttgtacagcaaataattataaaatgatatacctattttttaggctttgttatgattacatcaaatgtggacttcatacatagaaatcaacgcttacaggtgtccttttttaagaatttcatacataagatcacttattatacatacatacatatccagtaacaagaagcaaggaataattacctgcttaagtctgcgattaaaaaaataacgtttcgatacagttcatataaggcggctcaatgcagaaccgaggatagcgctacgtcaggatatctttgtagttcccaaatataaatgcgacaatatagtttctttctttcatatcaataatatccttttctccactgaaatcacgaatcaaacctggagcaaaaactaaagccaaattataaagcgtcattcgattccagtgactgtaccgtgtaaccttttctatatgttcactcagtactcttaacaccctataatgttcccttggaaggtcttccaatatgttttttaaagcgctcttgctcgacatataagtgtccgaattctttgcttctaaggacaactttcctccaacaaatggcaagttttccatcatttttttagatttaactaacctcatcaacggctcgtatatttgaaaggtaaagatagggttggggagctttcttaagtatcgcttcaacacaccagtaacaacgttgagatcttgttccgttaaaatatttggcgtttcggtattttgttgtactttccatgcagaaaattgcttttctatttcttctatgactagctgggaacctgattttctataaatgccctccgatctcatattttcttcgtctgattcaataaaatctatgcagacagatagtatcatcggtatttcattgttttcataattgcacctagcaacgagacttgaaccatacaaattgcttccatccaaatattcttctccatctttactttgtcccatatttgcatcg

SEQ ID NO: 83 - DNA, 1713 bp, Saccharomyces cerevisiae
atggattctagaacagttggtatattaggagggggacaattgggacgtatgattgttgaggcagcaaacaggctcaacattaagacggtaatactagatgctgaaaattctcctgccaaacaaataagcaactccaatgaccacgttaatggctccttttccaatcctcttgatatcgaaaaactagctgaaaaatgtgatgtgctaacgattgagattgagcatgttgatgttcctacactaaagaatcttcaagtaaaacatcccaaattaaaaatttacccttctccagaaacaatcagattgatacaagacaaatatattcaaaaagagcatttaatcaaaaatggtatagcagttacccaaagtgttcctgtggaacaagccagtgagacgtccctattgaatgttggaagagatttgggttttccattcgtcttgaagtcgaggactttggcatacgatggaagaggtaacttcgttgtaaagaataaggaaatgattccggaagctttggaagtactgaaggatcgtcctttgtacgccgaaaaatgggcaccatttactaaagaattagcagtcatgattgtgagatctgttaacggtttagtgttttcttacccaattgtagagactatccacaaggacaatatttgtgacttatgttatgcgcctgctagagttccggactccgttcaacttaaggcgaagttgttggcagaaaatgcaatcaaatcttttcccggttgtggtatatttggtgtggaaatgttctatttagaaacaggggaattgcttattaacgaaattgccccaaggcctcacaactctggacattataccattgatgcttgcgtcacttctcaatttgaagctcatttgagatcaatattggatttgccaatgccaaagaatttcacatctttctccaccattacaacgaacgccattatgctaaatgttcttggagacaaacatacaaaagataaagagctagaaacttgcgaaagagcattggcgactccaggttcctcagtgtacttatatggaaaagagtctagacctaacagaaaagtaggtcacataaatattattgcctccagtatggcggaatgtgaacaaaggctgaactacattacaggtagaactgatattccaatcaaaatctctgtcgctcaaaagttggacttggaagcaatggtcaaaccattggttggaatcatcatgggatcagactctgacttgccggtaatgtctgccgcatgtgcggttttaaaagattttggcgttccatttgaagtgacaatagtctctgctcatagaactccacataggatgtcagcatatgctatttccgcaagcaagcgtggaattaaaacaattatcgctggagctggtggggctgctcacttgccaggtatggtggctgcaatgacaccacttcctgtcatcggtgtgcccgtaaaaggttcttgtctagatggagtagattctttacattcaattgtgcaaatgcctagaggtgttccagtagctaccgtcgctattaataatagtacgaacgctgcgctgttggctgtcagactgcttggcgcttatgattcaagttatacaacgaaaatggaacagtttttattaaagcaagaagaagaagttcttgtcaaagcacaaaagttagaaactgtcggttacgaagcttatctagaaaacaag

SEQ ID NO: 84 - DNA, 3099 bp, artificial sequence
  pHD1327 ade-de2 with ZM6.22-MHP42-MHP107-ZM6.3-LIG3-4
atggattctagaacagttggtatattaggagggggacaattgggacgtatgattgttgaggcagcaaacaggctcaacattaagacggtaatactagatgctgaaaattctcctgccaaacaaataagcaactccaatgaccacgttaatggctccttttccaatcctcttgatatcgaaaaactagctgaaaaatgtgatgtgctaacgattgagattgagcatgttgatgttcctacactaaagaatcttcaagtaaaacatcccaaattaaaaatttacccttctccagaaacaatcagattgatacaagacaaatatattcaaaaagagcatttaatcaaaaatggtatagcagttacccaaagtgttcctgtggaacaagccagtgagacgtccctattgaatgttggaagagatttgggttttccattcgtcttgaagtcgaggactttggcatacgatggaagaggtaacttcgttgtaaagaataaggaaatgattccggaagctttggaagtactgaaggatcgtcctttgtacgccgaaaaatgggcaccatttactaaagaattagcagtcatgattgtgagatctgttaacggtttagtgttttcttacccaattgtagagactatccacaaggacaatatttgtgacttatgttatgcgcctgctagagttccggactccgttcaacttaaggcgaagttgttggcagaaaatgcaatcaaatcttttcccggttgtggtatatttggtgtggaaatgttctatttagaaacaggggaattgcttattaacgaaattgccccaaggcctcacaactctggacattataccattgatgcttgcgtcacttctcaatttgaagctcatttgagatcaatattggatttgccaatgccaaagaatttcacatctttctccaccattacaacgaacgccattatgctaaatgttcttggagacaaacatacaaaagataaagagctagaaaggcgcgccattgctctctcacatacttttagtttctcacgcgtgagagccttctagtatacgtgagagaccttgcaggctctcgtaaatgcgcctgctcgagatatacctcacacgtacgcgtagtgttgaagaaacatgaaattgcccagtattcttaacccaactgcacagaacaaaaacctgcaggaaacgaagataaatcatgtcgaaagctacatataaggaacgtgctgctactcatcctagtcctgttgctgccaagctatttaatatcatgcacgaaaagcaaacaaacttgtgtgcttcattggatgttcgtaccaccaaggaattactggagttagttgaagcattaggtcccaaaatttgtttactaaaaacacatgtggatatcttgactgatttttccatggagggcacagttaagccgctaaaggcattatccgccaagtacaattttttactcttcgaagacagaaaatttgctgacattggtaatacagtcaaattgcagtactctgcgggtgtatacagaatagcagaatgggcagacattacgaatgcacacggtgtggtgggcccaggtattgttagcggtttgaagcaggcggcagaagaagtaacaaaggaacctagaggccttttgatgttagcagaattgtcatgcaagggctccctatctactggagaatatactaagggtactgttgacattgcgaagagcgacaaagattttgttatcggctttattgctcaaagagacatgggtggaagagatgaaggttacgattggttgattatgacacccggtgtgggtttagatgacaagggagacgcattgggtcaacagtatagaaccgtggatgatgtggtctctacaggatctgacattattattgttggaagaggactatttgcaaagggaagggatgctaaggtagagggtgaacgttacagaaaagcaggctgggaagcatatttgagaagatgcggccagcaaaactaaaaaactgtattataagtaaatgcatgtatactaaactcacaaattagagcttcaatttaattatatcagttattacccttaaggcgaagttgttggcagaaaatgcaatcaaatcttttcccggttgtggtatatttggtgtggaaatgttctatttagaaacaggggaattgcttattaacgaaattgccccaaggcctcacaactctggacattataccattgatgcttgcgtcacttctcaatttgaagctcatttgagatcaatattggatttgccaatgccaaagaatttcacatctttctccaccattacaacgaacgccattatgctaaatgttcttggagacaaacatacaaaagataaagagctagaaacttgcgaaagagcattggcgactccaggttcctcagtgtacttatatggaaaagagtctagacctaacagaaaagtaggtcacataaatattattgcctccagtatggcggaatgtgaacaaaggctgaactacattacaggtagaactgatattccaatcaaaatctctgtcgctcaaaagttggacttggaagcaatggtcaaaccattggttggaatcatcatgggatcagactctgacttgccggtaatgtctgccgcatgtgcggttttaaaagattttggcgttccatttgaagtgacaatagtctctgctcatagaactccacataggatgtcagcatatgctatttccgcaagcaagcgtggaattaaaacaattatcgctggagctggtggggctgctcacttgccaggtatggtggctgcaatgacaccacttcctgtcatcggtgtgcccgtaaaaggttcttgtctagatggagtagattctttacattcaattgtgcaaatgcctagaggtgttccagtagctaccgtcgctattaataatagtacgaacgctgcgctgttggctgtcagactgcttggcgcttatgattcaagttatacaacgaaaatggaacagtttttattaaagcaagaagaagaagttcttgtcaaagcacaaaagttagaaactgtcggttacgaagcttatctagaaaacaag

SEQ ID NO: 85 - DNA, 22 bp, zea mays
gggcggtatgtatgtcatacta

SEQ ID NO: 86 - protein, 350 aa, artificial sequence
  MHP77
MNTKYNKEFLLYLAGFVDGDGSIIAQIKPEQCYKFKHRLMLTFTVTQKTQRRWFLDKLVDEIGVGYVRDRGSVSDYILSQIKPLHNFLTQLQPFLKLKQKQANLVLKIIEQLPSAKESPDKFLEVCTWVDQIAALNDSKTRKTTSETVRAVLDSLPGSVGGLSPSQASSAASSASSSPGSGISEALRAGATKSKEFLLYLAGFVDGDGSIIASIRPEQSRKFKHRLELRFTVTQKTQRRWFLDKLVDEIGVGYVYDQGSVSHYRLSQIKPLHNFLTQLQPFLKLKQKQANLVLKIIEQLPSAKESPDKFLEVCTWVDQIAALNDSKTRKTTSETVRAVLDSLSEKKKSSP

SEQ ID NO: 87 - protein, 350 aa, artificial sequence
  MHP77(L72-01a)
MNTKYNKEFLLYLAGFVDGDGSIIAQIKPEQCYKFKHRLMLTFTVTQKTQRRWFLDKLVDEIGVGYVRDRGSVSDYILSQIKPLHNFLTQLQPFLKLKQKQANLVLKIIEQLPSAKESPDKFLEVCTWVDQIAALNDSKTRKTTSETVRAVLDSLPGSVGGLSPSQASSAASSASSSPGSGISEALRAGATKSKEFLLYLAGFVDADGSIIASIRPEQSRKFKHRLELRFTITQKTQRRWFLDKLVDEIGVGYVYDQGSVSHYRLSQIKPLHNFLTQLQPFLKLKQKQANLVLKIIEQLPSAKESPDKFLEVCTWVDQIAALNDSKTRKTTSETVRAVLDSLSEKKKSSP

SEQ ID NO: 88 - protein, 350 aa, artificial sequence
  MHP77(L72-08a)
MNTKYNKEFLLYLAGFVDADGSIIAQIKPEQCYKFKHRLMLTFTVTQKTQRRWFLDKIVDEIGVGYVRDRGSVSDYILSQIKPLHNFLTQLQPFLKLKQKQANLVLKIIEQLPSAKESPDKFLEVCTWVDQIAALNDSKTRKTTSETVRAVLDSLPGSVGGLSPSQASSAASSASSSPGSGISEALRAGATKSKEFLLYLAGFVDGDGSIIASIRPEQSRKFKHRLELRFTVTQKTQRRWFLDKLVDEIGVGYVYDQGSVSHYRLSQIKPLHNFLTQLQPFLKLKQKQANLVLKIIEQLPSAKESPDKFLEVCTWVDQIAALNDSKTRKTTSETVRAVLDSLSEKKKSSP

SEQ ID NO: 89 - protein, 350 aa, artificial sequence
  MHP77(L72-09a)
MNTKYNKEFLLYLAGFVDADGSIIAQIKPEQCYKFKHRLMLTFTVTQKTQRRWFLDKIVDEIGVGYVRDRGSVSDYILSQIKPLHNFLTQIQPFLKLKQKQANLVLKIIEQLPSAKESPDKFLEVCTWVDQIAALNDSKTRKTTSETVRAVLDSLPGSVGGLSPSQASSAASSASSSPGSGISEALRAGATKSKEFLLYLAGFVDGDGSIIASIRPEQSRKFKHRLELRFTVTQKTQRRWFLDKLVDEIGVGYVYDQGSVSHYRLSQIKPLHNFLTQLQPFLKLKQKQANLVLKIIEQLPSAKESPDKFLEVCTWVDQIAALNDSKTRKTTSETVRAVLDSLSEKKKSSP

SEQ ID NO: 90 - protein, 350 aa, artificial sequence
  MHP77(L73-02a)
MNTKYNKEFLLYLAGFVDADGSLIAQIKPEQCYKFKHRLMLTFTVTQKTQRRWFLDKIVDEIGVGYVRDRGSVSDYILSQIKPLHNFLTQIQPFIKLKQKQANLVLKIIEQLPSAKESPDKFLEVCTWVDQIAALNDSKTRKTTSETVRAVLDSLPGSVGGLSPSQASSAASSASSSPGSGISEALRAGATKSKEFLLYLAGFVDGDGSIIASIRPEQSRKFKHRLELRFTVTQKTQRRWFLDKLVDEIGVGYIYDQGSVSHYRLSQIKPLHNFLTQLQPFLKLKQKQANLVLKIIEQLPSAKESPDKFLEVCTWVDQIAALNDSKTRKTTSETVRAVLDSLSEKKKSSP

SEQ ID NO: 91 - protein, 350 aa, artificial sequence
  MHP77(L73-05a)
MNTKYNKEFLLYLAGFVDGDGSIIAQIKPEQCYKFKHRLMLTFTVTQKTQRRWFLDKLVDEIGVGYVRDRGSVSDYILSQIKPLHNFLTQLQPFLKLKQKQANLVLKIIEQLPSAKESPDKFLEVCTWVDQIAALNDSKTRKTTSETVRAVLDSLPGSVGGLSPSQASSAASSASSSPGSGISEALRAGATKSKEFLLYLAGFVDADGSIIASIRPEQSRKFKHRLELRFTVTQKTQRRWFLDKLVDEIGVGYVYDQGSVSHYRLSQIKPLHNFLTQIQPFFKLKQKQTNLVLKIIEQLPSAKESPDKFLEVCTWVDQIAALNDSKTRKTTSETVRAVLDSLSEKKKSSP

SEQ ID NO: 92 - protein, 349 aa, artificial sequence
  MHP77(L9-01)
MNTKYNKEFLLYLAGIVDSDGSIIAQIKPEQCYKFKHRLMLTFTVTQKTRRRWFLDKLHDEIGVGYVRDRGSVSDYILSQKKPLHNFLTQLQPFLKLKQKQANLVLKIIEQLPSAKESPDGFLEVCTWVDQVAALNDSKTRKTTSETVRAVLLSLPGSWEVYRHLRHPAPHPRLPQARVQGSPKHSELEQLSPKSFLYLAGFVDGDGSIIASIRPEQSRKFKHRLELRFTVTQKTQRRWFLDELVDEIGVGYVYDQGSVSHYRLSQIKPLHNFLTQLQPYLKLKQKQANLVLKIIEQLPSAKESPDKFLEVCTWADQVAALNDSKTRKTTSETVRAVLDSLSEKKKSSP

SEQ ID NO: 93 - protein, 350 aa, artificial sequence
  MHP77(L9-02)
MNTKYNKEFLLYLAGFVDGDGSIIAQIKPEQCYKFKHRLMLTFTVTQKTRRRWILDKLVDEIGVGYVRDRGSVSDYILSQKKPLHNFLTQLQPFLKLKQKQAVLVLKIIEQLPSAKESPDGFLEVCTWVDQVAALNDSKTRKTTSETVRAVLLSLPGSVGGLSPSQASSAASSASSSPGSGISEALRAGATKSKEFLLYLAGFVDGDGSIIASIRPEQSRKFKHRLELRFTVTQKTQRRWFLDKLVDEIGVGYVYDQGSVSHYRLSQIKPLHNFLTQLQPYLKLKQKQANLVLKIIEQLPSAKESPDKFLEVCTWVDQIAALNDSKTRKTTSETVRAVLDSLSEKKKSSP

SEQ ID NO: 94 - protein, 350 aa, artificial sequence
  MHP77(L9-03)
MNTKYNKEFLLYLAGFVDSDGSIIAQIKPEQCYKFKHRLMLTFTVTQKTQRRWILLKLVDEIGVGYVRDRGSVSDYILSQKKPLHNFLTQLQPFLKLKQKQAVLVLKIIEQLPSAKESPDGFLEVCTWVDQIAALNDSKTRKTTSETVRAVLLSLPGSVGGLSPSQASSAASSASSSPGSGISEALRAGATKSKEFLLYLAGFVDGDGSIIASIRPEQSRKFKHRLELRFTVTQKTQRRWFLDELVDEIGVGYVYDQGSVSHYRLSQIKPLHNFLTQLQPFLKLKQKQANLVLKIIEQLPSAKESPDKFLEVCTWVDQVAALNDSKTRKTTSETVRAVLDSLSEKKKSSP

SEQ ID NO: 95 - protein, 350 aa, artificial sequence
  MHP77(L9-04)
MNTKYNKEFLLYLAGFVDGDGCIIAQIKPEQCYKFKHRLMLTFTVTQKTQRRWILDKLVDEIGVGYVRDRGSVSDYILSQIKPLHNFLTQLQPFLKLKQKQANLVLKIIEQLPSAKESPDKFLEVCTWVDQIAALNDSKTRKTTSETVRAVLDSLPGSVGGLSPSQASSAASSASSSPGSGISEALRAGATKSKEFLLYLAGFVDGDGSIIASIRPEQSRKFKHRLELRFTVTQKTQRRWFLDELVDEIGVGYVYDQGSVSHYRLSQIKPLHNFLTQLQPYLKLKQKQANLVLKIIEQLPSAKESPDKFLEVCTWADQVAALNDSKTRKTTSETVRAVLDSLSEKKKSSP

SEQ ID NO: 96 - protein, 350 aa, artificial sequence
  MHP77(L9-06)
MNTKYNKEFLLYLAGFVDSDGCIIAQIKPEQCYKFKHRLMLTFTVTQKTRRRWILLKLVDEIGVGYVRDRGSVSDYILSQIKPLHNFLTQLQPFLKLKQKQANLVLKIIEQLPSAKESPDKFLEVCTWVDQIAALNDSKTRKTTSETVRAVLDSLPGSVGGLSPSQASSAASSASSSPGSGISEALRAGATKSKEFLLYLAGFVDGDGSIIASIRPEQSRKFKHRLELRFTVTQKTQRRWFLDELVDEIGVGYVYDQGSVSHYRLSQIKPLHNFLTQLQPFLKLKQKQANLVLKIIEQLPSAKESPDGFLEVCTWVDQVAALNDSKTRKTTSETVRAVLDSLSEKKKSSP

SEQ ID NO: 97 - protein, 350 aa, artificial sequence
  MHP77(L9-09)
MNTKYNKEFLLYLAGIVDSDGCIIAQIKPEQCYKFKHRLMLTFTVTQKTRRRWFLDKLHDEIGVGYVRDRGSVSDYILSQIKPLHNFLTQLQPFLKLKQKQAVLVLKIIEQLPSAKESPDKFLEVCTWVDQVAALNDSKTRKTTSETVRAVLLSLPGSVGGLSPSQASSAASSASSSPGSGISEALRAGATKSKEFLLYLAGFVDGDGSIIASIRPEQSRKFKHRLELRFTVTQKTQRRWFLDELVDEIGVGYVYDQGSVSHYRLSQIKPLHNFLTQLQPFLKLKQKQANLVLKIIEQLPSAKESPDGFLEVCTWVDQIAALNDSKTRKTTSETVRAVLDSLSEKKKSSP

SEQ ID NO: 98 - protein, 350 aa, artificial sequence
  MHP77(L9-10)
MNTKYNKEFLLYLAGIVDSDGSIIAQIKPEQCYKFKHRLMLTFTVTQKTKRRWILLKLHDEIGVGYVRDRGSVSDYILSQKKPLHNFLTQLQPFLKLKQKQANLVLKIIEQLPSAKESPDGFLEVCTWVDQVAALNDSKTRKTTSETVRAVLLSLPGSVGGLSPSQASSAASSASSSPGSGISEALRAGATKSKEFLLYLAGFVDGDGSIIASIRPEQSRKFKHRLELRFTVTQKTQRRWFLDELVDEIGVGYVYDQGSVSHYRLSQIKPLHNFLTQLQPFLKLKQKQANLVLKIIEQLPSAKESPDKFLEVCTWVDQVAALNDSKTRKTTSETVRAVLDSLSEKKKSSP

SEQ ID NO: 99 - protein, 350 aa, artificial sequence
  MHP77(L9-11)
MNTKYNKEFLLYLAGFVDGDGSIIAQIKPEQCYKFKHRLMLTFTVTQKTKRRWFLDKLVDEIGVGYVRDRGSVSDYILSQKKPLHNFLTQLQPFLKLKQKQANLVLKIIEQLPSAKESPDGFLEVCTWVDQIAALNDSKTRKTTSETVRAVLLSLPGSVGGLSPSQASSAASSASSSPGSGISEALRAGATKSKEFLLYLAGFVDGDGSIIASIRPEQSRKFKHRLELRFTVTQKTQRRWFLDKLVDEIGVGYVYDQGSVSHYRLSQIKPLHNFLTQLQPFLKLKQKQANLVLKIIEQLPSAKESPDKFLEVCTWADQIAALNDSKTRKTTSETVRAVLDSLSEKKKSSP

SEQ ID NO: 100 - protein, 350 aa, artificial sequence
  MHP77(L9-12)
MNTKYNKEFLLYLAGFVDSDGSIIAQIKPEQCYKFKHRLMLTFTVTQKTQRRWILLKLVDEIGVGYVRDRGSVSDYILSQIKPLHNFLTQLQPFLKLKQKQANLVLKIIEQLPSAKESPDKFLEVCTWVDQIAALNDSKTRKTTSETVRAVLLSLPGSVGGLSPSQASSAASSASSSPGSGISEALRAGATKSKEFLLYLAGFVDGDGSIIASIRPEQSRKFKHRLELRFTVTQKTQRRWFLDELVDEIGVGYVYDQGSVSHYRLSQIKPLHNFLTQLQPYLKLKQKQANLVLKIIEQLPSAKESPDGFLEVCTWVDQIAALNDSKTRKTTSETVRAVLDSLSEKKKSSP

SEQ ID NO: 101 - protein, 350 aa, artificial sequence
  MHP77(L112-03a)
MNTKYNKEFLLYLAGFVDGDGSIIAQIKPEQCYKFKHRLMLTFTVTQKTQRRWFLDKLVDEIGVGYVRDRGTVSDYILSQIKPLHNFLTQLQPFLKLKQKQANLVLKIIEQLPSAKESPDKFLEVCTWVDQIAALNDSKTRKTTSETVRAVLDSLPGSVGGLSPSQASSAASSASSSPGSGISEALRAGATKSKEFLLYIAGFVDADGSIIASIRPEQSRKFKHRLELRFTVTQKSLRRWFLDKLVDEIGVGYVYDQGSVSHYRLSQIKPLHNFLTQLQPFLKLKQKQANLVLKIIEQLPSAKESPDKFLEVCTWVDQIAALNDSKTRKTTSETVRAVLDSLSEKKKSSP

SEQ ID NO: 102 - protein, 350 aa, artificial sequence
  MHP77(L113-01)
MNTKYNKEFLLYLAGFVDGDGSIIAQIKPEQCYKFKHRLMLTFTVTQKTQRRWFLDKLVDEIGVGYVRDRGTASDYILSQIKPLHNFLTQLQPFLKLKQKQANLVLKIIEQLPSAKESPDKFLEVCTWVDQIAALNDSKTRKTTSETVRAVLDSLPGSVGGLSPSQASSAASSASSSPGSGISEALRAGATKSKEFLLYLAGFLDADGSIIASIRPEQSRKFKHRLELRFTVTQKTQRRWFLDKLVDEIGVGYVYDQGSVSHYRLSQIKPLHNFLTQLQPFLKLKQKQANLVLKIIEQLPSAKESPDKFLEVCTWVDQIAALNDSKTRKTTSETVRAVLDSLSEKKKSSP

SEQ ID NO: 103 - protein, 350 aa, artificial sequence
  MHP77(L13-01a)
MNTKYNKEFLLYLAGFVDGDGSIIAQIKPEQRYKFKHRLMLTFTVTQKTQRRWFLDKLVDEIGVGYVRDRGSVSDYILSQIKPLHNFLTQLQPFLKLKQKQANLVLKIIEQLPSAKESPDKFLRVCTWVDRIAALNDSKTRKTTSETVRAVLDSLPGSVGGLSPSQASSAASSASSSPGSGISEALRAGATKSKEFLLYLAGFVDGDGSIIASIRPEQSRKFKHRLELRFTVTQKTQRRWFLDKLVDEIGVGYVYDQGSVSHYRLSQIKPLHNFLTQLQPFLKLKQKQANLVLKIIEQLPSAKESPDKFLEVCTWVDQIAALNDSKTRKTTSETVRAVLDSLSEKKKSSP

SEQ ID NO: 104 - protein, 350 aa, artificial sequence
  MHP77(L13-02)
MDTKYNKEFLLYLAGFVDGDGSIIAQIRPEQCYKFKHRLMLTLTVTQKTQRRWFLDKLVDEIGVGYVRDRGSVSDYILSQIKPLHNFLTQLQPFLKLKQKQANLVLKIIEQLPSAKESPDKFLEVCTWVDQIAALNDSKTRKTTSETVRAVLDSLPGSVGGLSPSQASSAASSASSSPGSGISEALRAGATKSKEFLLYLAGFVDGDGSIIASIRPEQSRKFKHRLELRFTVTQKTQRRWFLDKLVDEIGVGYVYDQGSVSHYRLSQIKPLHNFLTQLQPFLKLKQKQANLVLKIIEQLPSAKESPDKFLEVCTWADQIAALNDSKTRKTTSETVRAVLDSLSEKKKSSP

SEQ ID NO: 105 - protein, 350 aa, artificial sequence
  MHP77(L13-04)
MNTKYNKEFLLYLAGFVDGDGSIIAQIKPEQCYKFKHRLMLTFTVTQKTQRRWFLDKLVDEIGVGYVRDRGSVSDYILSQIKPLHNFLTQLQPFLKLKQKQANLVLKIIEQLPSAKESPDKFLEVCTWVDQIAALNDSKTRKTTSETVRAVLDSLPGSVGGLSPSQASSAASSASSSPGSGISEALRAGATKSKEFLLYLAGFVDGDGSIIASIRPEQSRKFKHRLELRFTVTQKTQRRWFLDKLVDEIGVGYVYDQGSVSHYRLSQIKPLHNFLTQLQPFLKLKQKQANLVLKIIEQLPSAKESPDKFLEVCTWADQIAALNDSKTRKTTSETVRAVLDSLSEKKKSSP

SEQ ID NO: 106 - protein, 350 aa, artificial sequence
  MHP77(L13-06)
MNTKYNKEFLLYLAGFVDGDGSIIAQIKPGQCYKFKHRLMLTFTVTQKTQRRWFLDKLVDEIGVGYVRDRGSASDYILSQIKPLHNFLTQLQPFLKLKQKQANLVLKIIERLPSAKESPDKFLEVCTWVDQIAALNDSKTRKTTSETVRAALDSLPGSVGGLSPSQASSAASSASSSPGSGISEALRAGATKSKEFLLYLAGFVDGDGSIIASIRPEQSRKFKHRLELRFTVTQKTQRRWFLDKLVDEIGVGYVYDQGSVSHYRLSQIKPLHNFLTQLQPFLKLKQKQANLVLKIIEQLPSAKESPDKFLEVCTWVDQIAALNDSKTRKTTSEAVRAVLDSSSEKKKSSP

SEQ ID NO: 107 - protein, 350 aa, artificial sequence
  MHP77(L13-08a)
MNTKYNKEFLLYLAGFVDGDGSIIAQIKPEQRYKFKHRLMLTFTVTQKTRRRWFLDKLADEIGVGYVRDRGSVSDYILSQIKPLHDFLTQLQPFLKLKQKQANLVLKIIEQLSSAKESPDKFLEVCTWVDQIAALNDSKTRKTTSETVRAVLDSLPGSVGGLSPSQASSAASSASSSPGSGISEALRAGATKSKEFLLYLAGFVDGDGSIIASIRPEQSRKFKHRLELRFTVTQKTQRRWFLDKLVDEIGVGYVYDQGSVSHYRLSQIKPLHNFLTQLQPFLKLKQKQANLVLKIIEQLPSAKESPDKFLEVCTWVDQIAALNDSKTRKTTSETVRAVLDSLSEKKKSSP

SEQ ID NO: 108 - protein, 350 aa, artificial sequence
  MHP77(L13-10B1)
MNTKYNKEFLLHLAGFVDGDGSIIAQIKPEQCYKFKHRLMLTFTVTQKTQRRWFLDKLVDEIGVGYVRDRGSVSDYILSQIKPLHNFLTQLQPFLKLKQKQANLALKIIEQLPSAKESPDKFLEVCTWVDQIAALNDSKTRKTTSETVRAVLDSLPGSVGGLSPSQASSAASSASSSPGSGISEALRAGATKSKEFLLYLAGFVDGDGSIMASIRPEQSRKFKHRLELRFTVTQKTQRRWFLDKLVDEIGVGYVYDQGSVSHYRLSQIKPLHNFLTQLQPFLKLKQKQANLVLKIIEQLPSAKESPDKFLEVCTWVDQIAALNDSKTRKTTSETVRAVLDSLSEKKKSSP

SEQ ID NO: 109 - protein, 350 aa, artificial sequence
  MHP77(L13-11)
MNTKYNKEFLLYLAGFVDGDGSIIAQIKPEQRYKFKHRLMLTFTVTQKTQRRWFLDKLVDEIGVGYVRDRGSVSDYILSQIKPLHNFLTQLQPFLKLKQKQANLVLKIIEQLPPAKESPDKFLEVCTWVDQVAALNDSKTRKTTSETVRAVLDSLPGSVGGLSPSQASSAASSASSSPGSGISEALRAGATKSKEFLLYLAGFVDGDGSIIASIRPEQSRKFKHRLELRFTVTQKTQRRWFLDKLVDEIGVGYVYDQGSVSHYRLSQIKPLHNFLTQLQPFLKLKQKQANLVLKIIEQLPSAKESPDKFLEVCTWVDQIAALNDSKTRKTTSETVRAVLDSLSEKKKSSP

SEQ ID NO: 110 - protein, 350 aa, artificial sequence
  MHP77(L13-12)
MNTKYNKEFLLYLAGFVDGDGSIIAQIKPEQCYKFKHRLMLTFTVTQKTQRRWILDKLVDEIGVGYVRDRGSVSDYILSQIKPLHNFLTQLQPFLKLKQKQANLVLKIIEQLPSAKESPDKFLEVCTWVDQIAALNDSKTRKTTSETVRAVLDSLPGSVGGLSPSQASSAASSASSSPGSGVSEALRAGATKSKEFLLYLAGFVDGDGSIIASIRPEQSRKFKHRLELRFTVTQKTQRRWFLDKLVDEIGVGYVYDQGSVSHYRLSQIKPLHNFLTQLQPFLKLKQKQANLVLKIIEQLPSAKESPDKFLEVCTWVDQIAALNDSKTRKTTSETVRAVLGSLSEKKKSSP

SEQ ID NO: 111 - protein, 350 aa, artificial sequence
  MHP77(L15-02)
MNTKYNKEFLLYLAGFVDGDGSIIAQIKPEQRYKFKHRLMLTFTVTQKTQRRWFLDKLVDEIGVGYVRDRGSASDYILSQIKPLHNFLTQLQPFLKLKQKQANLALKIIEQLPSAKESPDKFLEVCTWVDQIAALNDSKTRKTTSETVRAVLDSLPGSVGGLSPSQASSAASSASSSPGSGISEALRAGATKSKEFLLYLAGFVDGDGSIIASIRPEQSRKFKHRLELRFTVTQKTQRRWFLDKLVDEIGVGYVYDQGSVSHYRLSQIKPLHNFLTQLQPFLKLKQKQANLVLKIIEQLPSAKESPDKFLEVCTWVDQIAALNDSKTRKTTSETVRAVLGSLSEKKKSSP

SEQ ID NO: 112 - protein, 350 aa, artificial sequence
  MHP77(L15-03)
MNTKYNKEFLLHLAGFVDGDGSIIAQIKPEQRYKFKHRLMLTFTVTQKTQRRWFLDKLADEIGVGYVRDRGSASDYILSQIKPLHNFLTQLQPFLKLKQKQANLVLKIIEQLPSAKESPDKFLEVCTWVDQIAALNDSKTRKTTSETVRAVLDSLPGSVGGLSPSQASSAASSASSSPGSGISEALRAGATKSKEFLLYLAGFVDGDGSIIASIRPEQSRKFKHRLELRFTVTQKTQRRWFLDKLVDEIGVGYVYDQGSVSHYRLSQIKPLHNFLTQLQPFLKLKQKQANLVLKIIEQLPSAKESPDKFLEVCTWVDQIAALNDSKTRKTTSETVRAVLDSLSEKKKSSP

SEQ ID NO: 113 - protein, 350 aa, artificial sequence
  MHP77(L15-05)
MNTKYNKEFLLYLAGFVDGDGSIIAQIKPEQRYKFKHRLMLTFTVTQKTQRRWILDKLVDEIGVGYVRDRGSASDYILSQIKPLHNFLTQLQPFLKLKQKQANLVLKIIEQLPSAKESPDKFLEVCTWVDQIAALNDSKTRKTTSETVRAVLDSLPGSVGGLSPSQASSAASSASSSPGSGISEALRAGATKSKEFLLYLAGFVDGDGSIIASIRPEQSRKFKHRLELRFTVTQKTQRRWFLDKLVDEIGVGYVYDQGSVSHYRLSQIKPLHNFLTQLQPFLKLKQKQANLVLKIIEQLPSAKESPDKFLEVCTWVDQIAALNDSKTRKTTSETVRAVLDSLSEKKKSSP

SEQ ID NO: 114 - protein, 350 aa, artificial sequence
  MHP77(L15-06)
MNTKYNKEFLLHLAGFVDGDGSIIAQIKPEQRYKFKHRLMLTFTVTQKTQRRWFLDKLVDEIGVGYVRDRGSASDYILSQIKPLHNFLTQLQPFLKLKQKQANLVLKIIEQLPSAKESPDKFLEVCTWADQIAALNDSKTRKTTSETVRAVLDSLPGSVGGLSPSQASSAASSASSSPGSGISEALRAGATKSKEFLLYLAGFVDGDGSIIASIRPEQSRKFKHRLELRFTVTQKTQRRWFLDKLVDEIGVGYVYDQGSVSHYRLSQIKPLHNFLTQLQPFLKLKQKQANLVLKIIEQLPSAKESPDKFLEVCTWVDQIAALNDSKTRKTTSETVRAVLDSLSEKKKSSP

SEQ ID NO: 115 - protein, 350 aa, artificial sequence
  MHP77(L15-08)
MNTKYNKEFLLYLAGFVDGDGSIIAQIKPEQRYKFKHRLMLTFTVTQKTRRRWFLDKLVDEIGVGYVRDRGSVSDYILSQIKPLHNFLTQLQPFLKLKQKQANLVLKIIEQLPSAKESPDKFLEVCTWVDRIAALNDSKTRKTTSETVRAVLDSLPGSVGGLSPSQASSAASSASSSPGSGISEALRAGATKSKEFLLYLAGFVDGDGSIIASIRPEQSRKFKHRLELRFTVTQKTQRRWFLDKLVDEIGVGYVYDQGSVSHYRLSRIKPLHNFLTQLQPFLKLKQKQANLVLKIIEQLPSAKESPDKFLEVCTWVDQIAALNDSKTRKTTSETVRAVFDSLSEKKKSSP

SEQ ID NO: 116 - protein, 350 aa, artificial sequence
  MHP77(L15-10)
MNTKYNKEFLLHLAGFVDGDGSIIAQIKPEQCYKFKHRLMLTFTVTQKTRRRWFLDKLADEIGVGYVRDRGSASDYILSQIKPLHNFLTQLQPFLKLKQKQANLVLKIIEQLPSAKESPDKFLEVCTWVDQIAALNDSKTRKTTSETVRAVLDSLPGSVGGLSPSQASSAASSASSSPGSGISEALRAGATKSKEFLLYLAGFVDGDGSIIASIRPEQSRKFKHRLELRFTVTQKTQRRWFLDKLVDEIGVGYVYDQGSVSHYRLSQIKPLHNFLTQLQPFLKLKQKQANLVLKIIEQLPSAKESPDKFLEVCTWVDQIAALNDSKTRKTTSETVRAVLDSLSEKKKSSP

SEQ ID NO: 117 - protein, 350 aa, artificial sequence
  MHP77(L15-11)
MNTKYNKEFLLYLAGFVDGDGSIIAQIRPEQCYKFKHRLMLTFTVTQKTQRRWILDKLVDEIGVGYVRDRGSVSDYILSQIKPLHNFLTQLQPFLKLKQKQANLVLKIIEQLPSAKESPDKFLEVCTWVDQIAALNDSKTRKTTSETVRAVLDSLPGSVGGLSPSQASSAASSASSSPGSGISEALRAGATKSKEFLLYLAGFVDGDGSIMASIRPEQSRKFKHRLELRFTVTQKTQRRWFLDKLVDEIGVGYVYDQGSVSHYRLSQIKPLHNFLTQLQPFLKLKQKQANLVLKIIEQLPSAKESPDKFLEVCTWVDQIAALNDSKTRKTTSETVRAVLDSLSEKKKSSP

SEQ ID NO: 118 - protein, 350 aa, artificial sequence
  MHP77(L15-12)
MNTKYNKEFLLHLAGFVDGDGSIIAQIKPEQCYKFKHRLMLTFTVTQKTQRRWFLDKLVDEIGVGYVRDRGSASDYILSQIKPLHNFLTQLQPFLKLKQKQANLVLKIIEQLPSAKESPDKFLEVCTWVDQIAALNDSKTRKTTSETVRAVLDSLPGSVGGLSPSQASSAASSASSSPGSGVSEALRAGATKSKEFLLYLAGFVDGDGSIIASIRPEQSRKFKHRLELRFTVTQKTQRRWFLDKLVDEIGVGYVYDQGSVSHYRLSQIKPLHNFLTQLQPFLKLKQKQANLVLKIIEQLPSAKESPDKFLEVCTWVDQIAALNDSKTRKTTSETVRAVLDSLSEKKKSSP

SEQ ID NO: 119 - protein, 350 aa, artificial sequence
  MHP77(L15-13)
MNTKYNKEFLLHLAGFVDGDGSIIAQIKPEQRYKFKHRLMLTFTVTQKTQRRWFLDKLADEIGVGYVRDRGSASDYILSQIKPLHNFLTQLQPFLKLKQKQANLVLKIIEQLPSAKESPDKFLEVCTWADQIAALNDSKTRKTTSETVRAVLDSLPGSVGGLSPSQASSAASSASSSPGSGISEALRAGATKSKEFLLYLAGFVDGDGSIIASIRPEQSRKFKHRLELRFTVTQKTQRRWFLDKLVDEIGVGYVYDQGSVSHYRLSQIKPLHNFLTQLQPFLKLKQKQANLVLKIIEQLPSAKESPDKFLEVCTWVDQIAALNDSKTRKTTSETVRAVLDSLSEKKKSSP

SEQ ID NO: 120 - protein, 350 aa, artificial sequence
  MHP77(L15-15)
MNTKYNKEFLLHLAGFVDGDGSIIAQIKPEQRYKFKHRLMLTFTVTQKTQRRWFLDKLVDEIGVGYVRDRGSVSDYILSQIKPLHNFLTQLQPFLKLKQKQANLALKIIEQLSSAKESPDKFLRVCTWVDQIAALNDSKTRKTTSETVRAVLDSLPGSVGGLSPSQASSAASSASSSPGSGISEALRAGATKSKEFLLYLAGFVDGDGSIMASIRPEQSRKFKHRLELRFTVTQKTQRRWFLDKLVDEIGVGYVYDQGSVSHYRLSQIKPLHNFLTQLQPFLKLKQKQANLVLKIIEQLPSAKESPDKFLEVCTWVDQIAALNDSKTRKTTSETVRAVLDSLSEKKKSSP

SEQ ID NO: 121 - protein, 350 aa, artificial sequence
  MHP77(L15-16)
MNTKYNKEFLLYLAGFVDGDGSIIAQIRPEQCYKFKHRLMLTFTVTQKTQRRWFLDKLVDEIGVGYVRDRGSVSDYILSQIKPLHNFLTQLQPFLKLKQKQANLALKIIEQLPSAKESPDKFLRVCTWVDQIAALNDSKTRKTTSETVRAVLDSLPGSVGGLSPSQASSAASSASSSPGSGISEALRAGATKSKEFLLYLAGFVDGDGSIIASIRPEQSRKFKHRLELRFTVTQKTQRRWFLDKLVDEIGVGYVYDQGSVSHYRLSQIKPLHNFLTQLQPFLKLKQKQANLVLKIIEQLPSAKESPDKFLEVCTWVDQIAALNDSKTRKTTSETVRAVFDSLSEKKKSSP

SEQ ID NO: 122 - protein, 350 aa, artificial sequence
  MHP77(L15-18)
MNTKYNKEFLLHLAGFVDGDGSIIAQIKPEQRYKFKHRLMLTFTVTQKTQRRWFLDKLVDEIGVGYVRDRGSVSDYILSQIKPLHDFLTQLQPFLKLKQKQANLVLKIIEQLPSAKESPDKFLRVCTWVDQIAALNDSKTRKTTSETVRAVLDSLPGSVGGLSPSQASSAASSASSSPGSGVSEALRAGATKSKEFLLYLAGFVDGDGSIIASIRPEQSRKFKHRLELRFTVTQKTQRRWFLDKLVDEIGVGYVYDQGSVSHYRLSQIKPLHNFLTQLQPFLKLKQKQANLVLKIIEQLPSAKESPDKFLEVCTWVDQIAALNDSKTRKTTSETVRAVLDSLSEKKKSSP

SEQ ID NO: 123 - protein, 350 aa, artificial sequence
  MHP77(L15-20)
MNTKYNKEFLLYLAGFVDGDGSIIAQIKPEQRYKFKHRLMLTFTVTQKTQRRWFLDKLVDEIGVGYVRDRGSASDYILSQIKPLHNFLTQLQPFLKLKQKQANLALKIIEQLPSAKESPDKFLEVCTWVDQIAALNDSKTRKTTSETVRAVLDSLPGSVGGLSPSQASSAASSASSSPGSGISEALRAGATKSKEFLLYLAGFVDGDGSIIASIRPEQSRKFKHRLELRFTVTQKTQRRWFLDKLVDEIGVGYVYDQGSVSHYRLSRIKPLHNFLTQLQPFLKLKQKQANLVLKIIEQLPSAKESPDKFLEVCTWVDQIAALNDSKTRKTTSETVRAVLDSLSEKKKSSP

SEQ ID NO: 124 - protein, 350 aa, artificial sequence
  MHP77(L15-21)
MNTKYNKEFLLYLAGFVDGDGSIIAQIKPEQCYKFKHRLMLTFTVTQKTQRRWILDKLVDEIGVGYVRDRGSASDYILSQIKPLHNFLTQLQPFLKLKQKQANLVLKIIEQLSSAKESPDKFLEVCTWVDQIAALNDSKTRKTTSETVRAVLDSLPGSVGGLSPSQASSAASSASSSPGSGVSEALRAGATKSKEFLLYLAGFVDGDGSIIASIRPEQSRKFKHRLELRFTVTQKTQRRWFLDKLVDEIGVGYVYDQGSVSHYRLSQIKPLHNFLTQLQPFLKLKQKQANLVLKIIEQLPSAKESPDKFLEVCTWADQIAALNDSKTRKTTSETVRAVLDSLSEKKKSSP

SEQ ID NO: 125 - protein, 350 aa, artificial sequence
  MHP77(L15-23)
MNTKYNKEFLLYLAGFVDGDGSIIAQIKPEQCYKFKHRLMLTFTVTQKTQRRWFLDKLVDEIGVGYVRDRGSVSDYILSQIKPLHNFLTQLQPFLKLKQKQANLALKIIEQLPSAKESPDKFLRVCTCVDRIAALNDSKTRKTTSETVRAVLDSLPGSVGGLSPSQASSAASSASSSPGSGISEALRAGATKSKEFLLYLAGFVDGDGSIIASIRPEQSRKFKHRLELRFTVTQKTQRRWFLDKLVDEIGVGYVYDQGSVSHYRLSQIKPLHNFLTQLQPFLKLKQKQANLVLKIIEQLPSAKESPDKFLEVCTWVDQIAALNDSKTRKTTSETVRAVLDSLSEKKKSSP

SEQ ID NO: 126 - protein, 350 aa, artificial sequence
  MHP77(L15-24)
MNTKYNKEFLLHLAGFVDGDGSIIAQIKPEQRYKFKHRLMLTFTVTQKTRRRWFLDKLVDEIGVGYVRDRGSVSDYILSQIKPLHNFLTQLQPFLKLKQKQANLVLKIIEQLPSAKESPDKFLEVCTWVDQIAALNDSKTRKTTSETVRAVLDSLPGSVGGLSPSQASSAASSASSSPGSGISEALRAGATKSKEFLLYLAGFVDGDGSIIASIRPEQSRKFKHRLELRFTVTQKTQRRWFLDKLVDEIGVGYVYDQGSVSHYRLSQIKPLHNFLTQLQPFLKLKQKQANLVLKIIEQLPSAKESPDKFLEVCTWVDQIAALNDSKTRKTTSETVRAVLGSLSEKKKSSP

SEQ ID NO: 127 - protein, 350 aa, artificial sequence
  MHP77(L15-28)
MNTKYNKEFLLHLAGFVDGDGSIIAQIKPEQRYKFKHRLMLTLTVTQKTQRRWFLDKLVDEIGVGYVRDRGSVSDYILSQIKPLHNFLTQLQPFLKLKQKQANLALKIIEQLPSAKESPDKFLEVCTWVDQIAALNDSKTRKTTSETVRAVLDSLPGSVGGLSPSQASSAASSASSSPGSGISEALRAGATKSKEFLLYLAGFVDGDGSIIASIRPEQSRKFKHRLELRFTVTQKTQRRWFLDKLVDEIGVGDVYDQGSVSHYRLSRIKPLHNFLTQLQPFLKLKQKQANLVLKIIEQLPSAKESPDKFLEVCTWVDQIAALNDSKTRKTTSETVRAVLDSLSEKKKSSP

SEQ ID NO: 128 - protein, 350 aa, artificial sequence
  MHP77(L15-29)
MNTKYNKEFLLYLAGFVDGDGSIIAQIKPEQRYKFKHRLMLTFTVTQKTQRRWILDKLVDEIGVGYVRDRGSVSDYILSQIKPLHNFLTQLQPFLKLKQKQANLVLKIIEQLPSAKESPDKFLRVCTWVDQIAALNDSKTRKTTSETVRAVLDSLPGSVGGLSPSQASSAASSASSSPGSGISEALRAGATKSKEFLLYLAGFVDGDGSIMASIRPEQSRKFKHRLELRFTVTQKTQRRWFLDKLVDEIGVGYVYDQGSVSHYRLSRIKPLHNFLTQLQPFLKLKQKQANLVLKIIEQLPSAKESPDKFLEVCTWVDQIAALNDSKTRKTTSETVRAVLGSLSEKKKSSP

SEQ ID NO: 129 - protein, 350 aa, artificial sequence
  MHP77(L15-33)
MNTKYNKEFLLHLAGFVDGDGSIIAQIKPEQRYKFKHRLMLTFTVTQKTQRRWFLDKLVDEIGVGYVRDRGSASDYILSQIKPLHNFLTQLQPFLKLKQKQANLALKIIEQLPSAKESPDKFLRVCTWVDQIAALNDSKTRKTTSETVRAVLDSLPGSVGGLSPSQASSAASSASSSPGSGISEALRAGATKSKEFLLYLAGFVDGDGSIIASIRPEQSRKFKHRLELRFTVTQKTQRRWFLDKLVDEIGVGYVYDQGSVSHYRLSQIKPLHNFLTQLQPFLKLKQKQANLVLKIIEQLPSAKESPDKFLEVCTWVDQIAALNDSKTRKTTSETVRAVLDSLSEKKKSSP

SEQ ID NO: 130 - protein, 350 aa, artificial sequence
  MHP77(L15-34)
MNTKYNKEFLLHLAGFVDGDGSIIAQIKPEQRYKFKHRLMLTFTVTQKTQRRWFLDKLVDEIGVGYVRDRGSASDYILSQIKPLHNFLTQLQPFLKLKQKQANLVLKIIEQLSSAKESPDKFLEVCTWVDRIAALNDSKTRKTTSETVRAVLDSLPGSVGGLSPSQASSAASSASSSPGSGISEALRAGATKSKEFLLYLAGFVDGDGSIIASIRPEQSRKFKHRLELRFTVTQKTQRRWFLDKLVDEIGVGYVYDQGSVSHYRLSQIKPLHNFLTQLQPFLKLKQKQANLVLKIIEQLPSAKESPDKFLEVCTWADQIAALNDSKTRKTTSETVRAVLDSLSEKKKSSP

SEQ ID NO: 131 - protein, 350 aa, artificial sequence
  MHP77(L15-35)
MNTKYNKEFLLYLAGFVDGDGSIIAQIKPEQRYKFKHRLMLTFTVTQKTRRRWFLDKLADEIGVGYVRDRGSVSDYILSQIKPLHDFLTQLQPFLKLKQKQANLVLKIIEQLPSAKESPDKFLRVCTWVDQIAALNDSKTRKTTSETVRAVLDSLPGSVGGLSPSQASSAASSASSSPGSGISEALRAGATKSKEFLLYLAGFVDGDGSIIASIRPEQSRKFKHRLELRFTVTQKTQRRWFLDKLVDEIGVGYVYDQGSVSHYRLSQIKPLHNFLTQLQPFLKLKQKQANLVLKIIEQLPSAKESPDKFLEVCTWVDQIAALNDSKTRKTTSETVRAVLDSLSEKKKSSP

SEQ ID NO: 132 - protein, 350 aa, artificial sequence
  MHP77(L15-36)
MNTKYNKEFLLHLAGFVDGDGSIIAQIKPEQCYKFKHRLMLTFTVTQKTRRRWFLDKLVDEIGVGYVRDRGSVSDYILSQIRPLHNFLTQLQPFLKLKQKQANLVLKIIEQLPSAKESPDKFLRVCTWVDQIAALNDSKTRKTTSETVRAVLDSLPGSVGGLSPSQASSAASSASSSPGSGISEALRAGATKSKEFLLYLAGFVDGDGSIIASIRPEQSRKFKHRLELRFTVTQKTQRRWFLDKLVDEIGVGYVYDQGSVSHYRLSQIKPLHNFLTQLQPFLKLKQKQANLVLKIIEQLPSAKESPDKFLEVCTWADQIAALNDSKTRKTTSETVRAVLGSLSEKKKSSP

SEQ ID NO: 133 - protein, 350 aa, artificial sequence
  MHP77(L15-39)
MDTKYNKEFLLHLAGFVDGDGSIIAQIKPEQRYKFKHRLMLTFTVTQKTRRRWFLDKLVDEIGVGYVRDRGSVSDYILSQIKPLHNFLTQLQPFLKLKQKQANLALKIIEQLPSAKESPDKFLEVCTWVDRIAALNDSKTRKTTSETVRAVLDSLPGSVGGLSPSQASSAASSASSSPGSGISEALRAGATKSKEFLLYLAGFVDGDGSIMASIRPEQSRKFKHRLELRFTVTQKTQRRWFLDKLVDEIGVGYVYDQGSVSHYRLSRIKPLHNFLTQLQPFLKLKQKQANLVLKIIEQLPSAKESPDKFLEVCTWVDQIAALNDSKTRKTTSETVRAVLDSLSEKKKSSP

SEQ ID NO: 134 - protein, 350 aa, artificial sequence
  MHP77(L15-40)
MNTKYNKEFLLYLAGFVDGDGSIIAQIKPEQRYKFKHRLMLTFTVTQKTQRRWILDKLVDEIGVGYVRDRGSASDYILSQIKPLHNFLTQLQPFLKLKQKQANLVLKIIEQLPSAKESPDKFLRVCTWVDQIAALNDSKTRKTTSETVRAVLDSLPGSVGGLSPSQASSAASSASSSPGSGISEALRAGATKSKEFLLYLAGFVDGDGSIIASIRPEQSRKFKHRLELRFTVTQKTQRRWFLDKLVDEIGVGYVYDQGSVSHYRLSRIKPLHNFLTQLQPFLKLKQKQANLVLKIIEQLPSAKESPDKFLEVCTWVDQIAALNDSKTRKTTSETVRAVLDSLSEKKKSSP

SEQ ID NO: 135 - protein, 350 aa, artificial sequence
  MHP77(L15-41)
MNTKYNKEFLLYLAGFVDGDGSIIAQIKPEQCYKFKHRLMLTFTVTQKTQRRWILDKLVDEIGVGYVRDRGSVSDYILSQIKPLHNFLTQLQPFLKLKQKQANLVLKIIEQLPSAKESPDKFLEVCTWVDQIAALNDSKTRKTTSETVRAVLDSLPGSVGGLSPSQASSAASSASSSPGSGISEALRAGATKSKEFLLYLAGFVDGDGSIMASIRPEQSRKFKHRLELRFTVTQKTQRRWFLDKLVDEIGVGYVYDQGSVSHYRLSQIKPLHNFLTQLQPFLKLKQKQANLVLKIIEQLPSAKESPDKFLEVCTWVDQIAALNDSKTRKTTSETVRAVLDSLSEKKKSSP

SEQ ID NO: 136 - protein, 350 aa, artificial sequence
  MHP77(L15-42)
MNTKYNKEFLLYLAGFVDGDGSIIAQIKPEQRYKFKHRLMLTFTVTQKTQRRWFLDKLVDEIGVGYVRDRGSVSDYILSQIKPLHNFLTQLQPFLKLKQKQANLVLKIIEQLPSAKESPDKFLRVCTWVDQIAALNDSKTRKTTSETVRAVLDSLPGSVGGLSPSQASSAASSASSSPGSGVSEALRAGATKSKEFLLYLAGFVDGDGSIMASIRPEQSRKFKHRLELRFTVTQKTQRRWFLDKLVDEIGVGYVYDQGSVSHYRLSQIKPLHNFLTQLQPFLKLKQKQANLVLKIIEQLPSAKESPDKFLEVCTWVDQIAALNDSKTRKTTSETVRAVFDSLSEKKKSSP

SEQ ID NO: 137 - protein, 350 aa, artificial sequence
  MHP77(L15-43)
MNTKYNKEFLLYLAGFVDGDGSIIAQIKPEQCYKFKHRLMLTFTVTQKTQRRWFLDKLVDEIGVGYVRDRGSVSDYILSQIKPLHNFLTQLQPFLKLKQKQANLVLKIIEQLSSAKESPDKFLEVCTWVDRIAALNDSKTRKTTSETVRAVLDSLPGSVGGLSPSQASSAASSASSSPGSGISEALRAGATKSKEFLLYLAGFVDGDGSIIASIRPEQSRKFKHRLELRFTVTQKTQRRWFLDKLVDEIGVGYVYDQGSVSHYRLSQIKPLHNFLTQLQPFLKLKQKQANLVLKIIEQLPSAKESPDKFLEVCTWADQIAALNDSKTRKTTSETVRAVLDSLSEKKKSSP

SEQ ID NO: 138 - protein, 350 aa, artificial sequence
  MHP77(L15-45)
MNTKYNKEFLLYLAGFVDGDGSIIAQIKPEQRYKFKHRLMLTFTVTQKTRRRWFLDKLVDEIGVGYVRDRGSVSDYILSQIKPLHNFLTQLQPFLKLKQKQANLALKIIEQLPSAKESPDKFLRVCTWVDRIAALNDSKTRKTTSETVRAVLDSLPGSVGGLSPSQASSAASSASSSPGSGISEALRAGATKSKEFLLYLAGFVDGDGSIIASIRPEQSRKFKHRLELRFTVTQKTQRRWFLDKLVDEIGVGYVYDQGSVSHYRLSQIKPLHNFLTQLQPFLKLKQKQANLVLKIIEQLPSAKESPDKFLEVCTWADQIAALNDSKTRKTTSETVRAVLDSLSEKKKSSP

SEQ ID NO: 139 - protein, 350 aa, artificial sequence
  MHP77(L15-46)
MNTKYNKEFLLHLAGFVDGDGSIIAQIKPEQRYKFKHRLMLTFTVTQKTRRRWFLDKLVDEIGVGYVRDRGSVSDYILSQIKPLHDFLTQLQPFLKLKQKQANLVLKIIEQLPSAKESPDKFLRVCTWVDQIAALNDSKTRKTTSETVRAVLDSLPGSVGGLSPSQASSAASSASSSPGSGVSEALRAGATKSKEFLLYLAGFVDGDGSIIASIRPEQSRKFKHRLELRFTVTQKTQRRWFLDKLVDEIGVGYVYDQGSVSHYRLSQIKPLHNFLTQLQPFLKLKQKQANLVLKIIEQLPSAKESPDKFLEVCTWVDQIAALNDSKTRKTTSETVRAVFDSLSEKKKSSP

SEQ ID NO: 140 - protein, 350 aa, artificial sequence
  MHP77(L15-27)
MNTKYNKEFLLHLAGFVDGDGSIIAQIKPEQRYKFKHRLMLTFTVTQKTQRRWFLDKLVDEIGVGYVRDRGSASDYILSQIKPLHNFLTQLQPFLKLKQKQANLALKIIEQLPSAKESPDKFLEVCTWVDRIAALNDSKTRKTTSETVRAVLDSLPGSVGGLSPSQASSAASSASSSPGSGISEALRAGATKSKEFLLYLAGFVDGDGSIMASIRPEQSRKFKHRLELRFTVTQKTQRRWFLDKLVDEIGVGYVYDQGSVSHYRLSQIKPLHNFLTQLQPFLKLKQKQANLVLKIIEQLPSAKESPDKFLEVCTWVDQIAALNDSKTRKTTSETVRAVLDSLSEKKKSSP

SEQ ID NO: 141 - protein, 350 aa, artificial sequence
  MHP77(L15-30)
MNTKYNKEFLLYLAGFVDGDGSIIAQIRPEQCYKFKHRLMLTLTVTQKTQRRWFLDKLADEIGVGYVRDRGSASDYILSQIKPLHNFLTQLQPFLKLKQKQANLVLKIIEQLPSAKESPDKFLEVCTWVDQIAALNDSKTRKTTSETVRAVLDSLPGSVGGLSPSQASSAASSASSSPGSGVSEALRAGATKSKEFLLYLAGFVDGDGSIIASIRPEQSRKFKHRLELRFTVTQKTQRRWFLDKLVDEIGVGYVYDQGSVSHYRLSRIKPLHNFLTQLQPFLKLKQKQANLVLKIIEQLPSAKESPDKFLEVCTWVDQIAALNDSKTRKTTSETVRAVLDSLSEKKKSSP

SEQ ID NO: 142 - protein, 350 aa, artificial sequence
  MHP77(L15-31)
MNTKYNKEFLLYLAGFVDGDGSIIAQIKPEQRYKFKHRLMLTFTVTQKTQRRWILDKLVDEIGVGYVRDRGSASDYILSQIKPLHNFLTQLQPFLKLKQKQANLVLKIIEQLPSAKESPDKFLEVCTWVDQIAALNDSKTRKTTSETVRAVLDSLPGSVGGLSPSQASSAASSASSSPGSGVSEALRAGATKSKEFLLYLAGFVDGDGSIIASIRPEQSRKFKHRLELRFTVTQKTQRRWFLDKLVDEIGVGYVYDQGSVSHYRLSQIKPLHNFLTQLQPFLKLKQKQANLVLKIIEQLPSAKESPDKFLEVCTWVDQIAALNDSKTRKTTSETVRAVLDSLSEKKKSSP

SEQ ID NO: 143 - protein, 350 aa, artificial sequence
  MHP77(L15-47)
MNTKYNKEFLLHLAGFVDGDGSIIAQIRPEQCYKFKHRLMLTFTVTQKTQRRWFLDKLVDEIGVGYVRDRGSVSDYILSQIKPLHNFLTQLQPFLKLKQKQANLVLKIIEQLPSAKESPEKFLEVCTWVDQIAALNDSKTRKTTSETVRAVLDSLPGSVGGLSPSQASSAASSASSSPGSGISEALRAGATKSKEFLLYLAGFVDGDGSIIASIRPEQSRKFKHRLELRFTVTQKTQRRWFLDKLVDEIGVGYVYDQGSVSHYRLSQIKPLHNFLTQLQPFLKLKQKQANLVLKIIEQLPSAKESPDKFLEVCTWADQIAALNDSKTRKTTSETVRAVLDSLSEKKKSSP

SEQ ID NO: 144 - protein, 350 aa, artificial sequence
  MHP77(L16-01)
MNTKYNKEFLLYLAGFVDGDGSIIAQIKPEQRYKFKHRLMLTFTVTQKTQRRWILLKLVDEIGVGYVRDRGSVSDYILSQIKPLHNFLTQLQPFLKLKQKQANLVLKIIEQLPSAKESPDKFLEVCTWVDQIAALNDSKTRKTTSETVRAVLLSLPGSVGGLSPSQASSAASSASSSPGSGISEALRAGATKSKEFLLYLAGFVDGDGSIMASIRPEQSRKFKHRLELRFTVTQKTQRRWFLDKLVDEIGVGYVYDQGSVSHYRLSQIKPLHNFLTQLQPFLKLKQKQANLVLKIIEQLPSAKESPDKFLEVCTWADQIAALNDSKTRKTTSETVRAVLDSLSEKKKSSP

SEQ ID NO: 145 - protein, 350 aa, artificial sequence
  MHP77(L16-02)
MNTKYNKEFLLYLAGFVDGDGSIIAQIRPEQCYKFKHRLMLTFTVTQKTQRRWILDKLVDEIGVGYVRDRGSVSDYILSQIKPLHNFLTQLQPFLKLKQKQANLVLKIIEQLPSAKESPDKFLEVCTWVDQIAALNDSKTRKTTSETVRAVLDSLPGSVGGLSPSQASSAASSASSSPGSGISEALRAGATKSKEFLLYLAGFVDGDGSIMASIRPEQSRKFKHRLELRFTVTQKTQRRWFLDKLVDEIGVGYVYDQGSVSHYRLSQIKPLHNFLTQLQPFLKLKQKQANLVLKIIEQLPSAKESPDKFLEVCTWADQIAALNDSKTRKTTSETVRAVLDSLSEKKKSSP

SEQ ID NO: 146 - protein, 350 aa, artificial sequence
  MHP77(L16-03)
MNTKYNKEFLLYLAGFVDSDGSIIAQIKPEQRYKFKHRLMLTFTVTQKTQRRWFLDKLVDEIGVGYVRDRGSVSDYILSQIKPLHNFLTQLQPFLKLKQKQANLVLKIIEQLPSAKESPDKFLEVCTWVDQIAALNDSKTRKTTSETVRAVLLSLPGSVGGLSPSQASSAASSASSSPGSGISEALRAGATKSKEFLLYLAGFVDGDGSIMASIRPEQSRKFKHRLELRFTVTQKTQRRWFLDELVDEIGVGYVYDQGSVSHYRLSQIKPLHNFLTQLQPYLKLKQKQANLVLKIIEQLPSAKESPDKFLEVCTWADQIAALNDSKTRKTTSETVRAVLDSLSEKKKSSP

SEQ ID NO: 147 - protein, 350 aa, artificial sequence
  MHP77(L16-04)
MNTKYNKEFLLYLAGFVDGDGSIIAQIRPEQRYKFKHRLMLTFTVTQKTRRRWILDKLVDEIGVGYVRDRGSVSDYILSQIKPLHNFLTQLQPFLKLKQKQANLVLKIIEQLPSAKESPDKFLEVCTWVDQIAALNDSKTRKTTSETVRAVLDSLPGSVGGLSPSQASSAASSASSSPGSGVSEALRAGATKSKEFLLYLAGFVDGDGSIIASIRPEQSRKFKHRLELRFTVTQKTQRRWFLDKLVDEIGVGYVYDQGSVSHYRLSQIKPLHNFLTQLQPFLKLKQKQANLVLKIIEQLPSAKESPDKFLEVCTWVDQIAALNDSKTRKTTSETVRAVLDSLSEKKKSSP

SEQ ID NO: 148 - protein, 350 aa, artificial sequence
  MHP77(L16-05)
MNTKYNKEFLLYLAGFVDGDGSIIAQIKPEQRYKFKHRLMLTFTVTQKTRRRWILDKLVDEIGVGYVRDRGSASDYILSQKKPLHNFLTQLQPFLKLKQKQANLVLKIIEQLPSAKESPDKFLEVCTWVDQIAALNDSKTRKTTSETVRAVLLSLPGSVGGLSPSQASSAASSASSSPGSGISEALRAGATKSKEFLLYLAGFVDGDGSIIASIRPEQSRKFKHRLELRFTVTQKTQRRWFLDKLVDEIGVGYVYDQGSVSHYRLSQIKPLHNFLTQLQPFLKLKQKQANLVLKIIEQLPSAKESPDKFLEVCTWVDQIAALNDSKTRKTTSETVRAVLDSLSEKKKSSP

SEQ ID NO: 149 - protein, 350 aa, artificial sequence
  MHP77(L16-06)
MNTKYNKEFLLYLAGFVDGDGSIIAQIKPEQCYKFKHRLMLTFTVTQKTRRRWILDKLVDEIGVGYVRDRGTASDYILSQIKPLHNFLTQLQPFLKLKQKQANLVLKIIEQLPSAKESPDKFLEVCTWADQIAALNDSKTRKTTSETVRAVLLSLPGSVGGLSPSQASSAASSASSSPGSGISEALRAGATKSKEFLLYLAGFVDGDGSIIASIRPEQSRKFKHRLELRFTVTQKTQRRWFLDKLVDEIGVGYVYDQGSVSHYRLSQIKPLHNFLTQLQPFLKLKQKQANLVLKIIEQLPSAKESPDKFLEVCTWVDQIAALNDSKTRKTTSETVRAVLDSLSEKKKSSP

SEQ ID NO: 150 - protein, 350 aa, artificial sequence
  MHP77(L16-07)
MDTKYNKEFLLYLAGFVDGDGSIIAQIKPEQRYKFKHRLMLTFTVTQKTQRRWFLDKLVDEIGVGYVRDRGSVSDYILSQIKPLHNFLTQLQPFLKLKQKQANLVLKIIEQLPSAKESPDKFLEVCTWVDRIAALNDSKTRKTTSETVRAVLDSLPGSVGGLSPSQASSAASSASSSPGSGISEALRAGATKSKEFLLYLAGFVDGDGSIMASIRPEQSRKFKHRLELRFTVTQKTQRRWFLDKLVDEIGVGYVYDQGSVSHYRLSQIKPLHNFLTQLQPFLKLKQKQANLVLKIIEQLPSAKESPDKFLEVCTWVDQIAALNDSKTRKTTSETVRAVLDSLSEKKKSSP

SEQ ID NO: 151 - protein, 350 aa, artificial sequence
  MHP77(L16-08)
MNTKYNKEFLLHLAGFVDGDGSIIAQIKPEQRYKFKHRLMLTFTVTQKTQRRWFLDKLVDEIGVGYVRDRGTASDYILSQIKPLHDFLTQLQPFLKLKQKQANLALKIIEQLPSAKESPDKFLEVCTWVDQIAALNDSKTRKTTSETVRAVLDSLPGSVGGLSPSQASSAASSASSSPGSGISEALRAGATKSKEFLLYLAGFVDGDGSIMASIRPEQSRKFKHRLELRFTVTQKTQRRWFLDKLVDEIGVGYVYDQGSVSHYRLSRIKPLHNFLTQLQPFLKLKQKQANLVLKIIEQLPSAKESPDKFLEVCTWVDQIAALNDSKTRKTTSETVRAVLDSLSEKKKSSP

SEQ ID NO: 152 - protein, 350 aa, artificial sequence
  MHP77(L16-09)
MNTKYNKEFLLYLAGFVDADGSIIAQIKPEQCYKFKHRLMLTFTVTQKTQRRWILLKLVDEIGVGYVRDRGSASDYILSQIKPLHNFLTQLQPFLKLKQKQANLVLKIIEQLPSAKESPDKFLRVCTWVDRIAALNDSKTRKTTSETVRAVLDSLPGSVGGLSPSQASSAASSASSSPGSGISEALRAGATKSKEFLLYLAGFVDGDGSIIASIRPEQSRKFKHRLELRFTVTQKTQRRWFLDKLVDEIGVGYVYDQGSVSHYRLSQIKPLHNFLTQLQPFLKLKQKQANLVLKIIEQLPSAKESPDKFLEVCTWADQIAALNDSKTRKTTSETVRAVLDSLSEKKKSSP

SEQ ID NO: 153 - protein, 350 aa, artificial sequence
  MHP77(L16-11)
MNTKYNKEFLLYLAGFVDGDGSIIAQIRPEQRYKFKHRLMLTFTVTQKTQRRWILDKLVDEIGVGYVRDRGSASDYILSQIKPLHNFLTQLQPFLKLKQKQANLVLKIIEQLPSAKESPDKFLEVCTWVDQIAALNDSKTRKTTSETVRAVLDSLPGSVGGLSPSQASSAASSASSSPGSGISEALRAGATKSKEFLLYLAGFVDGDGSIIASIRPEQSRKFKHRLELRFTVTQKTQRRWFLDKLVDEIGVGYVYDQGSVSHYRLSRIKPLHNFLTQLQPFLKLKQKQANLVLKIIEQLPSAKESPDKFLEVCTWADQIAALNDSKTRKTTSETVRAVLDSLSEKKKSSP

SEQ ID NO: 154 - protein, 350 aa, artificial sequence
  MHP77(L16-12)
MNTKYNKEFLLYLAGFVDGDGSIIAQIKPEQRYKFKHRLMLTFTVTQKTQRRWFLDKLVDEIGVGYVRDRGSASDYILSQIKPLHNFLTQLQPFLKLKQKQANLVLKIIEQLPSAKESPDKFLRVCTWVDQVAALNDSKTRKTTSETVRAVLDSLPGSVGGLSPSQASSAASSASSSPGSGISEALRAGATKSKEFLLYLAGFVDGDGSIIASIRPEQSRKFKHRLELRFTVTQKTQRRWFLDKLVDEIGVGYVYDQGSVSHYRLSQIKPLHNFLTQLQPFLKLKQKQANLVLKIIEQLPSAKESPDKFLEVCTWADQIAALNDSKTRKTTSETVRAVLDSLSEKKKSSP

SEQ ID NO: 155 - protein, 350 aa, artificial sequence
  MHP77(L16-14)
MNTKYNKEFLLYLAGFVDGDGSIIAQIRPEQRYKFKHRLMLTFTVTQKTRRRWFLDKLADEIGVGYVRDRGSVSDYILSQIKPLHNFLTQLQPFLKLKQKQANLVLKIIEQLPSAKESPDKFLEVCTWVDQIAALNDSKTRKTTSETVRAVLLSLPGSVGGLSPSQASSAASSASSSPGSGISEALRAGATKSKEFLLYLAGFVDGDGSIIASIRPEQSRKFKHRLELRFTVTQKTQRRWFLDKLVDEIGVGYVYDQGSVSHYRLSQIKPLHNFLTQLQPFLKLKQKQANLVLKIIEQLPSAKESPDKFLEVCTWADQIAALNDSKTRKTTSETVRAVLDSLSEKKKSSP

SEQ ID NO: 156 - protein, 350 aa, artificial sequence
  MHP77(L16-15)
MNTKYNKEFLLYLAGFVDGDGSIIAQIKPEQRYKFKHRLMLTFTVTQKTQRRWILDKLVDEIGVGYVRDRGSASDYILSQKKPLHNFLTQLQPFLKLKQKQANLVLKIIEQLPSAKESPDKFLEVCTWVDQIAALNDSKTRKTTSETVRAVLDSLPGSVGGLSPSQASSAASSASSSPGSGVSEALRAGATKSKEFLLYLAGFLDADGSIIASIRPEQSRKFKHRLELRFTVTQKTQRRWFLDKLVDEIGVGYVYDQGSVSHYRLSQIKPLHNFLTQLQPFLKLKQKQANLVLKIIEQLPSAKESPDKFLEVCTWVDQIAALNDSKTRKTTSETVRAVLDSLSEKKKSSP

SEQ ID NO: 157 - protein, 350 aa, artificial sequence
  MHP77(L16-16)
MNTKYNKEFLLYLAGFVDGDGSIIAQIRPEQRYKFKHRLMLTFTVTQKTQRRWILDKIVDEIGVGYVRDRGSVSDYILSQIKPLHNFLTQLQPFLKLKQKQANLVLKIIEQLPSAKESPDKFLRVCTWVDQIAALNDSKTRKTTSETVRAVLDSLPGSVGGLSPSQASSAASSASSSPGSGISEALRAGATKSKEFLLYLAGFVDGDGSIIASIRPEQSRKFKHRLELRFTVTQKTQRRWFLDKLVDEIGVGYVYDQGSVSHYRLSQIKPLHNFLTQLQPYLKLKQKQANLVLKIIEQLPSAKESPDKFLEVCTWVDQIAALNDSKTRKTTSETVRAVFDSLSEKKKSSP

SEQ ID NO: 158 - protein, 350 aa, artificial sequence
  MHP77(L16-17)
MNTKYNKEFLLYLAGFVDGDGSIIAQIKPEQRYKFKHRLMLTFTVTQKTQRRWILLKLVDEIGVGYVRDRGTASDYILSQIKPLHNFLTQLQPFLKLKQKQANLVLKIIEQLPSAKESPDKFLEVCTWVDQVAALNDSKTRKTTSETVRAVLDSLPGSVGGLSPSQASSAASSASSSPGSGISEALRAGATKSKEFLLYLAGFVDGDGSIIASIRPEQSRKFKHRLELRFTVTQKTQRRWFLDELVDEIGVGYVYDQGSVSHYRLSQIKPLHNFLTQLQPFLKLKQKQANLVLKIIEQLPSAKESPDKFLEVCTWADQIAALNDSKTRKTTSETVRAVLDSLSEKKKSSP

SEQ ID NO: 159 - protein, 350 aa, artificial sequence
  MHP77(L16-18)
MDTKYNKEFLLYLAGFVDGDGSIIAQIKPEQRYKFKHRLMLTFTVTQKTRRRWFLDKLVDEIGVGYVRDRGSVSDYILSQIKPLHNFLTQLQPFLKLKQKQANLVLKIIEQLPSAKESPDKFLRVCTWVDRIAALNDSKTRKTTSETVRAVLDSLPGSVGGLSPSQASSAASSASSSPGSGISEALRAGATKSKEFLLYLAGFVDGDGSIIASIRPEQSRKFKHRLELRFTVTQKTQRRWFLDKLVDEIGVGYVYDQGSVSHYRLSQIKPLHNFLTQLQPFLKLKQKQANLVLKIIEQLPSAKESPDKFLEVCTWADQIAALNDSKTRKTTSETVRAVLDSLSEKKKSSP

SEQ ID NO: 160 - protein, 350 aa, artificial sequence
  MHP77(L16-19)
MNTKYNKEFLLYLAGFVDGDGSIIAQIKPEQCYKFKHRLMLTFTVTQKTRRRWILDKLVDEIGVGYVRDRGSVSDYILSQKKPLHNFLTQLQPFLKLKQKQANLALKIIEQLPPAKESPDKFLEVCTWVDRIAALNDSKTRKTTSETVRAVLDSLPGSVGGLSPSQASSAASSASSSPGSGISEALRAGATKSKEFLLYLAGFLDADGSIIASIRPEQSRKFKHRLELRFTVTQKTQRRWFLDKLVDEIGVGYVYDQGSVSHYRLSQIKPLHNFLTQLQPFLKLKQKQANLVLKIIEQLPSAKESPDKFLEVCTWADQIAALNDSKTRKTTSETVRAVLDSLSEKKKSSP

SEQ ID NO: 161 - protein, 350 aa, artificial sequence
  MHP77(L16-21)
MNTKYNKEFLLYLAGFVDADGSIIAQIKPEQRYKFKHRLMLTFTVTQKTQRRWFLDKLVDEIGVGYVRDRGTASDYILSQIKPLHNFLTQLQPFLKLKQKQANLVLKIIEQLPSAKESPDKFLEVCTWVDRIAALNDSKTRKTTSETVRAVLDSLPGSVGGLSPSQASSAASSASSSPGSGISEALRAGATKSKEFLLYLAGFVDGDGSIMASIRPEQSRKFKHRLELRFTVTQKTQRRWFLDELVDEIGVGYVYDQGSVSHYRLSQIKPLHNFLTQLQPYLKLKQKQANLVLKIIEQLPSAKESPDKFLEVCTWADQIAALNDSKTRKTTSETVRAVFDSLSEKKKSSP

SEQ ID NO: 162 - protein, 350 aa, artificial sequence
  MHP77(L16-23)
MNTKYNKEFLLYLAGFVDGDGSIIAQIKPEQRYKFKHRLMLTFTVTQKTQRRWILDKLVDEIGVGYVRDRGSASDYILSQIKPLHNFLTQLQPFLKLKQKQANLVLKIIEQLPSAKESPDKFLEVCTWVDQIAALNDSKTRKTTSETVRAVLLSLPGSVGGLSPSQASSAASSASSSPGSGISEALRAGATKSKEFLLYLAGFVDGDGSIIASIRPEQSRKFKHRLELRFTVTQKTQRRWFLDKLVDEIGVGYVYDQGSVSHYRLSQIKPLHNFLTQLQPFLKLKQKQANLVLKIIEQLPSAKESPDKFLEVCTWVDQIAALNDSKTRKTTSETVRAVLDSLSEKKKSSP

SEQ ID NO: 163 - protein, 350 aa, artificial sequence
  MHP77(L16-24)
MNTKYNKEFLLYLAGFVDGDGSIIAQIKPEQCYKFKHRLMLTFTVTQKTQRRWILDKLVDEIGVGYVRDRGSVSDYILSQIKPLHNFLTQLQPFLKLKQKQANLVLKIIEQLPSAKESPDKFLEVCTWVDRIAALNDSKTRKTTSETVRAVLDSLPGSVGGLSPSQASSAASSASSSPGSGISEALRAGATKSKEFLLYLAGFVDGDGSIIASIRPEQSRKFKHRLELRFTVTQKTQRRWFLDKLVDEIGVGYVYDQGSVSHYRLSRIKPLHNFLTQLQPFLKLKQKQANLVLKIIEQLPSAKESPDKFLEVCTWADQIAALNDSKTRKTTSETVRAVLDSLSEKKKSSP

SEQ ID NO: 164 - protein, 350 aa, artificial sequence
  MHP77(L17-12)
MNTKYNKEFLLYLAGFVDADGSLIAQIKPEQCYKFKHRLMLTFTVTQKTQRRWFLDKIVDEIGVGYVRDRGSVSDYILSQIKPLHNFLTQLQPFLKLKQKQANLVLKIIEQLPSAKESPDKFLEVCTWVDQIAALNDSKTRKTTSETVRAVLDSLPGSVGGLSPSQASSAASSASSSPGSGISEALRAGATKSKEFLLYLAGFVDGDGSIIASIRPEQSRKFKHRLELRFTVTQKTQRRWFLDKLVDEIGVGYVYDQGSVSHYRLSQIKPLHNFLTQLQPFLKLKQKQANLVLKIIEQLPSAKESPDKFLEVCTWVDQIAALNDSKTRKTTSETVRAVLDSLSEKKKSSP

SEQ ID NO: 165 - protein, 350 aa, artificial sequence
  MHP77(L18-01)
MNTKYNKEFLLYLAGFVDGDGSIIAQIKPEQCYKFKHRLMLTFTVTQKTQRRWFLDKLVDEIGVGYVRDRGTASDYILSQIKPLHNFLTQLQPFLKLKQKQANLVLKIIEQLPSAKESPDKFLEVCTWVDQIAALNDSKTRKTTSETVRAVLDSLPGSVGGLSPSQASSAASSASSSPGSGISEALRAGATKSKEFLLYLAGFVDADGSIIASIRPEQSRKFKHRLELRFTVTQKSLRRWFLDKLVDEIGVGYVYDQGSVSHYRLSQIKPLHNFLTQLQPFLKLKQKQANLVLKIIEQLPSAKESPDKFLEVCTWVDQIAALNDSKTRKTTSETVRAVLDSLSEKKKSSP

SEQ ID NO: 166 - protein, 350 aa, artificial sequence
  MHP77(L18-12)
MNTKYNKEFLLYLAGFVDGDGSIIAQIKPEQCYKFKHRLMLTFTVTQKTQRRWFLDKLVDEIGVGYVRDRGTASDYILSQIKPLHNFLTQLQPFLKLKQKQANLVLKIIEQLPSAKESPDKFLEVCTWVDQIAALNDSKTRKTTSETVRAVLDSLPGSVGGLSPSQASSAASSASSSPGSGISEALRAGATKSKEFLLYLAGFVDADGSIIASIRPEQSRKFKHRLELRFTVTQKTQRRWFLDKLVDEIGVGYVYDQGSVSHYRLSQIKPLHNFLTQIQPFFKLKQKQANLVLKIIEQLPSAKESPDKFLEVCTWVDQIAALNDSKTRKTTSETVRAVLDSLSEKKKSSP

SEQ ID NO: 167 - protein, 350 aa, artificial sequence
  MHP77(L17-01)
MNTKYNKEFLLYLAGFVDADGSIIAQIKPEQCYKFKHRLMLTFTVTQKTQRRWFLDKIVDEIGVGYVRDRGSVSDYILSQIKPLHNFLTQLQPFLKLKQKQANLVLKIIEQLPSAKESPDKFLEVCTWVDQIAALNDSKTRKTTSETVRAVLDSLPGSVGGLSPSQASSAASSASSSPGSGISEALRAGATKSKEFLLYLAGFVDGDGSIIASIRPEQSRKFKHRLELRFTVTQKTQRRWFLDKLVDEIGVGYIYDQGSVSHYRLSQIKPLHNFLTQLQPFLKLKQKQANLVLKIIEQLPSAKESPDKFLEVCTWVDQIAALNDSKTRKTTSETVRAVLDSLSEKKKSSP

SEQ ID NO: 168 - DNA, 1050 bp, artificial sequence
  MHP77 yeast
atgaacaccaagtacaacaaggagttcctgctctacctggccggcttcgtggacggcgacggctccatcattgcgcagatcaagccggaacagtgctacaagttcaagcaccggctcatgctgaccttcacagtgacccagaagacgcagaggcgctggttcctcgacaagctggtcgacgagatcggggtgggctacgtccgtgaccgcgggtcggtgtccgactacatcctctcccagatcaagcccctgcacaacttcctcacccagctccagccgttcctcaagctgaagcagaagcaggcgaacctcgtcctgaagatcatcgagcagctcccctcggccaaggagtccccggacaagttcctggaggtgtgcacgtgggtcgaccagatcgcggccctcaacgacagcaagacccgcaagacgacctcggagacggtgcgggcggtcctggactccctcccaggatccgtgggaggtctatcgccatctcaggcatccagcgccgcatcctcggcttcctcaagcccgggttcagggatctccgaagcactcagagctggagcaactaagtccaaagagtttttattatatttagcggggtttgtcgatggggatgggagtataatagccagtatacgccccgaacaatcgcgtaaatttaaacatcgcttagaattacgttttacggtcacgcaaaaaacccaacgtaggtggtttttagataaattagtggatgaaataggcgtcgggtatgtgtatgatcagggcagcgtcagtcattataggttaagtcaaataaaaccgttacataattttttaacgcaattacaaccctttttaaaattaaaacaaaaacaagccaatttagtgttaaaaataatagaacaattaccgagcgcgaaagaaagtcccgataaatttttagaagtctgtacctgggtggatcaaatagccgcgttaaatgattcaaaaacgaggaaaaccacgagcgaaaccgtcagagccgtgttagatagtttatcagaaaagaagaaaagcagtccg

SEQ ID NO: 169 - DNA, 1050 bp, artificial sequence
  MHP77(L72-01a)
atgaacaccaagtacaacaaggagttcctgctctacctggccggcttcgtggacggcgacggctccatcattgcgcagatcaagccggaacagtgctacaagttcaagcaccggctcatgctgaccttcacagtgacccagaagacgcagaggcgctggttcctcgacaagctggtcgacgagatcggggtgggctacgtccgtgaccgcgggtcggtgtccgactacatcctctcccagatcaagcccctgcacaacttcctcacccagctacagccgttcttaaagctgaagcagaagcaggcgaacctcgtcctgaagatcatcgagcagctcccctcggccaaggagtccccggacaagttcctggaggtgtgcacgtgggtcgaccagatcgcggccctcaacgacagcaagacccgcaagacgacctcggagacggtgcgggcggtcctggactccctcccaggatccgtgggaggtctatcgccatctcaggcatccagcgccgcatcctcggcttcctcaagcccgggttcagggatctccgaagcactcagagctggagcaactaagtccaaagagtttttattatatctagcggggtttgtcgatgctgatgggagtataatagccagtatacgccccgaacaatcgcgtaaatttaaacatcgcttagaattacgttttacgattacgcaaaaaacccaacgtaggtggtttttagataaattagtggatgaaataggcgtcgggtatgtgtatgatcagggcagcgtcagtcattataggttaagtcaaataaaaccgttacataattttttaacgcaattacaaccctttttaaaattaaaacaaaaacaagccaatttagtgttaaaaataatagaacaattaccgagcgcgaaagaaagtcccgataaatttttagaagtctgtacctgggtggatcaaatagccgcgttaaatgattcaaaaacgaggaaaaccacgagcgaaaccgtcagagccgtgttagatagtttatcagaaaagaagaaaagcagtccg

SEQ ID NO: 170 - DNA, 1050 bp, artificial sequence
  MHP77(L72-08a)
atgaacaccaagtacaacaaggagttcctgctctacctggccggcttcgtggacgctgatggcagcattattgcgcagatcaagccggaacagtgctacaagttcaagcaccggctcatgctgaccttcacagttacccagaagacgcagagacgctggttcctcgacaagatagtcgacgagatcggggtgggctacgttcgtgaccgcgggtcggtgtccgactacatcctctcccagatcaagcccctgcacaacttcctcacccagctccagccgttcctcaagctgaagcagaagcaggcgaacctcgtcctgaagatcatcgagcagctcccctcggccaaggagtccccggacaagttcctggaggtgtgcacgtgggtcgaccagatcgcggccctcaacgacagcaagacccgcaagacgacctcggagacggtgcgggcggtcctggactccctcccaggatccgtgggaggtctatcgccatctcaggcatccagcgccgcatcctcggcttcctcaagcccgggttcagggatctccgaagcactcagagctggagcaactaagtccaaagagtttttattatatttagcggggtttgtcgatggggatgggagtataatagccagtatacgccccgaacaatcgcgtaaatttaaacatcgcttagaattacgttttacggtcacgcaaaaaacccaacgtaggtggtttttagataaattagtggatgaaataggcgtcgggtatgtgtatgatcagggcagcgtcagtcattataggttaagtcaaataaaaccgttacataattttttaacgcaattacaaccctttttaaaattaaaacaaaaacaagccaatttagtgttaaaaataatagaacaattaccgagcgcgaaagaaagtcccgataaatttttagaagtctgtacctgggtggatcaaatagccgcgttaaatgattcaaaaacgaggaaaaccacgagcgaaaccgtcagagccgtgttagatagtttatcagaaaagaagaaaagcagtccg

SEQ ID NO: 171 - DNA, 1050 bp, artificial sequence
  MHP77(L72-09a)
atgaacaccaagtacaacaaggagttcctgctctacctggccggcttcgtggacgctgatggcagcattattgcgcagatcaagccggaacagtgctacaagttcaagcaccggctcatgctgaccttcacagtgacccagaagacgcagaggcgctggttcctcgacaagatagtcgacgagatcggggtgggctacgtccgtgaccgcgggtcggtgtccgactacatcctctcccagatcaagcccctgcacaacttcctcacccagatacagccgttcctcaagctgaagcagaagcaggcgaacctcgtcctgaagatcatcgagcagctcccctcggccaaggagtccccggacaagttcctggaggtgtgcacgtgggtcgaccagatcgcggccctcaacgacagcaagacccgcaagacgacctcggagacggtgcgggcggtcctggactccctcccaggatccgtgggaggtctatcgccatctcaggcatccagcgccgcatcctcggcttcctcaagcccgggttcagggatctccgaagcactcagagctggagcaactaagtccaaagagtttttattatatttagcggggtttgtcgatggggatgggagtataatagccagtatacgccccgaacaatcgcgtaaatttaaacatcgcttagaattacgttttacggtcacgcaaaaaacccaacgtaggtggtttttagataaattagtggatgaaataggcgtcgggtatgtgtatgatcagggcagcgtcagtcattataggttaagtcaaataaaaccgttacataattttttaacgcaattacaaccctttttaaaattaaaacaaaaacaagccaatttagtgttaaaaataatagaacaattaccgagcgcgaaagaaagtcccgataaatttttagaagtctgtacctgggtggaccaaatagccgcgttaaatgattcaaaaacgaggaaaaccacgagcgaaaccgtcagagccgtgttagatagtttatcagaaaagaagaaaagcagtccg

SEQ ID NO: 172 - DNA, 1050 bp, artificial sequence
  MHP77(L73-02a)
atgaacaccaagtacaacaaggagttcctgctctatctagccggcttcgtggacgctgatggcagcttaattgcgcagatcaagccggaacagtgctacaagttcaagcaccggctcatgctgaccttcacagtgacccagaagacgcagaggcgctggttcctcgacaagatagtcgacgagatcggggtgggctacgtccgtgaccgcgggtcggtgtccgactacatcctctcccagatcaagcccctgcacaacttcctcacccagatacagccgttcattaagctgaagcagaagcaggcgaacctcgtcctgaagatcatcgagcagctcccctcggccaaggagtccccggacaagttcctggaggtgtgcacgtgggtcgaccagatcgcggccctcaacgacagcaagacccgcaagacgacctcggagacggtgcgggcggtcctggactccctcccaggatccgtgggaggtctatcgccatctcaggcatccagcgccgcatcctcggcttcctcaagcccgggttcagggatctccgaagcactcagagctggagcaactaagtccaaagagtttttattatatttagcggggtttgtcgatggggatgggagtataatagccagtatacgccccgaacaatcgcgtaaatttaaacatcgcttagaattacgttttacggtcacgcaaaaaacccaacgtaggtggtttttagataaactagtggatgaaataggcgtcgggtatatttatgatcagggcagcgtcagtcattataggttgagtcaaataaaaccgttacataattttttaacgcaattacaaccctttttaaaattaaaacaaaaacaagccaatttagtgttaaaaataatagaacaattaccgagcgcgaaagaaagtcccgataaatttttagaagtctgtacctgggtggatcaaatagccgcgttaaatgattcaaaaacgaggaaaaccacgagcgaaaccgtcagagccgtgttagatagtttatcagaaaagaagaaaagcagtccg

SEQ ID NO: 173 - DNA, 1050 bp, artificial sequence
  MHP77(L73-05a)
atgaacaccaagtacaacaaggagttcctgctctacctggccggcttcgtggacggcgacggctccatcattgcgcagatcaagccggaacagtgctacaagttcaagcaccggctcatgctgaccttcacagtgacccagaagacgcagaggcgctggttcctcgacaagctggtcgacgagatcggggtgggctacgtccgtgaccgcgggtcggtgtccgactacatcctctcccagatcaagcccctgcacaacttcctcacccagctccagccgttcctcaagctgaagcagaagcaggcgaacctcgtcctgaagatcatcgagcagctcccctcggccaaggagtccccggacaagttcctggaggtgtgcacgtgggtcgaccagatcgcggccctcaacgacagcaagacccgcaagacgacctcggagacggtgcgggcggtcctggactccctcccaggatccgtgggaggtctatcgccatctcaggcatccagcgccgcatcctcggcttcctcaagcccgggttcagggatctccgaagcactcagagctggagcaactaagtccaaagagtttttattatatttagcggggtttgtcgatgctgatgggagtataatagccagtatacgccccgaacaatcgcgtaaatttaaacatcgcttagaattacgttttacggtcacgcaaaaaacccaacgtaggtggtttttagataaattagtggatgaaataggcgtcgggtatgtgtatgatcagggcagcgtcagtcattataggttaagtcaaataaaaccgttacataattttttaacgcaaatacaacccttctttaaattaaagcaaaaacaaacaaatttagtgttaaaaataatagaacaattaccgagcgcgaaagaaagtcccgataaatttttagaagtctgtacctgggtggaccaaatagccgcgttaaatgattcaaaaacgaggaaaaccacgagcgaaaccgtcagagccgtgttagatagtttatcagaaaagaagaaaagcagtccg

SEQ ID NO: 174 - DNA, 1047 bp, artificial sequence
  MHP77(L9-01)
atgaacaccaagtacaacaaggagttcctgctctacctggccggcatcgtggacagcgacggctctatcattgcgcagatcaagccggaacagtgctacaagttcaagcaccggctcatgctgaccttcacagtgacccagaagacgagaaggcgctggttcctcgataagctgcatgacgagatcggggtgggctacgtccgtgaccgcgggtcggtgtccgactacatcctctcccagaaaaagcccctgcacaacttcctcacccagctccagccgttcctcaagctgaagcagaagcaggcgaacctcgtcctgaagatcatcgagcagctcccctcggccaaggagtccccggacggtttcctggaggtgtgcacgtgggtcgaccaggttgcggccctcaacgacagcaagacccgcaagacgacctcggagacggtgcgggcggtcctgctgtccctcccaggatcctgggaggtctatcgccatctcaggcatccagcgccgcatcctcggcttcctcaagcccgggttcagggatctccgaagcactcagagctggagcaactaagtccaaagagttttttatatttagcggggtttgtcgatggggatgggagtataatagccagtatacgccccgaacaatcgcgtaaatttaaacatcgcttagaattacgttttacggtcacgcaaaaaacccaacgtaggtggtttttagatgaattagtggatgaaataggcgtcgggtatgtatatgatcagggcagcgtcagtcattataggttaagtcaaataaaaccgttacataattttttaacgcaattacaaccctacttaaaattaaaacaaaaacaagccaatttagtgttaaaaataatagaacaattaccgagcgcgaaagaaagtcccgataaatttttagaagtctgtacctgggcagatcaagttgccgcgttaaatgattcaaaaacgaggaaaaccacgagcgaaaccgtcagagccgtgttagatagtttatcagaaaagaagaaaagcagtccg

SEQ ID NO: 175 - DNA, 1050 bp, artificial sequence
  MHP77(L9-02)
atgaacaccaagtacaacaaggagttcctgctctacctggccggcttcgtggacggcgacggctctatcattgcgcagatcaagccggaacagtgctacaagttcaagcaccggctcatgctgaccttcacagtgacccagaagacgagaaggcgctggatcctcgataagctggtagacgagatcggggtgggctacgtccgtgaccgcgggtcggtgtccgactacatcctctcccagaaaaagcccctgcacaacttcctcacccagctccagccgttcctcaagctgaagcagaagcaggcggtcctcgtcctgaagatcatcgagcagctcccctcggccaaggagtccccggacggtttcctggaggtgtgcacgtgggtcgaccaggttgcggccctcaacgacagcaagacccgcaagacgacctcggagacggtgcgggcggtcctgctgtccctcccaggatccgtgggaggtctatcgccatctcaggcatccagcgccgcatcctcggcttcctcaagcccgggttcagggatctccgaagcactcagagctggagcaactaagtccaaagagtttttattatatttagcggggtttgtcgatggggatgggagtataatagccagtatacgccccgaacaatcgcgtaaatttaaacatcgcttagaattacgttttacggtcacgcaaaaaacccaacgtaggtggtttttagataaattagtggatgaaataggcgtcgggtatgtatatgatcagggcagcgtcagtcattataggttaagtcaaataaaaccgttacataattttttaacgcaattacaaccctacttaaaattaaaacaaaaacaagccaatttagtgttaaaaataatagaacaattaccgagcgcgaaagaaagtcccgataaatttttagaagtctgtacctgggtagatcaaattgccgcgttaaatgattcaaaaacgaggaaaaccacgagcgaaaccgtcagagccgtgttagatagtttatcagaaaagaagaaaagcagtccg

SEQ ID NO: 176 - DNA, 1050 bp, artificial sequence
  MHP77(L9-03)
atgaacaccaagtacaacaaggagttcctgctctacctggccggcttcgtggacagcgacggctctatcattgcgcagatcaagccggaacagtgctacaagttcaagcaccggctcatgctgaccttcacagtgacccagaagacgcaaaggcgctggatcctcttgaagctggtagacgagatcggggtgggctacgtccgtgaccgcgggtcggtgtccgactacatcctctcccagaaaaagcccctgcacaacttcctcacccagctccagccgttcctcaagctgaagcagaagcaggcggtcctcgtcctgaagatcatcgagcagctcccctcggccaaggagtccccggacggtttcctggaggtgtgcacgtgggtcgaccagattgcggccctcaacgacagcaagacccgcaagacgacctcggagacggtgcgggcggtcctgctgtccctcccaggatccgtgggaggtctatcgccatctcaggcatccagcgccgcatcctcggcttcctcaagcccgggttcagggatctccgaagcactcagagctggagcaactaagtccaaagagtttttattatatttagcggggtttgtcgatggggatgggagtataatagccagtatacgccccgaacaatcgcgtaaatttaaacatcgcttagaattacgttttacggtcacgcaaaaaacccaacgtaggtggtttttagatgaattagtggatgaaataggcgtcgggtatgtatatgatcagggcagcgtcagtcattataggttaagtcaaataaaaccgttacataattttttaacgcaattacaacccttcttaaaattaaaacaaaaacaagccaatttagtgttaaaaataatagaacaattaccgagcgcgaaagaaagtcccgataaatttttagaagtctgtacctgggtagatcaagttgccgcgttaaatgattcaaaaacgaggaaaaccacgagcgaaaccgtcagagccgtgttagatagtttatcagaaaagaagaaaagcagtccg

SEQ ID NO: 177 - DNA, 1050 bp, artificial sequence
  MHP77(L9-04)
atgaacaccaagtacaacaaggagttcctgctctacctggccggcttcgtggacggcgacggctgtatcattgcgcagatcaagccggaacagtgctacaagttcaagcaccggctcatgctgaccttcacagtgacccagaagacgcaaaggcgctggatcctcgataagctggtagacgagatcggggtgggctacgtccgtgaccgcgggtcggtgtccgactacatcctctcccagataaagcccctgcacaacttcctcacccagctccagccgttcctcaagctgaagcagaagcaggcgaacctcgtcctgaagatcatcgagcagctcccctcggccaaggagtccccggacaaattcctggaggtgtgcacgtgggtcgaccagattgcggccctcaacgacagcaagacccgcaagacgacctcggagacggtgcgggcggtcctggattccctcccaggatccgtgggaggtctatcgccatctcaggcatccagcgccgcatcctcggcttcctcaagcccgggttcagggatctccgaagcactcagagctggagcaactaagtccaaagagtttttattatatttagcggggtttgtcgatggggatgggagtataatagccagtatacgccccgaacaatcgcgtaaatttaaacatcgcttagaattacgttttacggtcacgcaaaaaacccaacgtaggtggtttttagatgaattagtggatgaaataggcgtcgggtatgtatatgatcagggcagcgtcagtcattataggttaagtcaaataaaaccgttacataattttttaacgcaattacaaccctacttaaaattaaaacaaaaacaagccaatttagtgttaaaaataatagaacaattaccgagcgcgaaagaaagtcccgataaatttttagaagtctgtacctgggcagatcaagttgccgcgttaaatgattcaaaaacgaggaaaaccacgagcgaaaccgtcagagccgtgttagatagtttatcagaaaagaagaaaagcagtccg

SEQ ID NO: 178 - DNA, 1050 bp, artificial sequence
  MHP77(L9-06)
atgaacaccaagtacaacaaggagttcctgctctacctggccggcttcgtggacagcgacggctgtatcattgcgcagatcaagccggaacagtgctacaagttcaagcaccggctcatgctgaccttcacagtgacccagaagacgagaaggcgctggatcctcttgaagctggtagacgagatcggggtgggctacgtccgtgaccgcgggtcggtgtccgactacatcctctcccagataaagcccctgcacaacttcctcacccagctccagccgttcctcaagctgaagcagaagcaggcgaacctcgtcctgaagatcatcgagcagctcccctcggccaaggagtccccggacaaattcctggaggtgtgcacgtgggtcgaccagattgcggccctcaacgacagcaagacccgcaagacgacctcggagacggtgcgggcggtcctggattccctcccaggatccgtgggaggtctatcgccatctcaggcatccagcgccgcatcctcggcttcctcaagcccgggttcagggatctccgaagcactcagagctggagcaactaagtccaaagagtttttattatatttagcggggtttgtcgatggggatgggagtataatagccagtatacgccccgaacaatcgcgtaaatttaaacatcgcttagaattacgttttacggtcacgcaaaaaacccaacgtaggtggtttttagatgaattagtggatgaaataggcgtcgggtatgtatatgatcagggcagcgtcagtcattataggttaagtcaaataaaaccgttacataattttttaacgcaattacaacccttcttaaaattaaaacaaaaacaagccaatttagtgttaaaaataatagaacaattaccgagcgcgaaagaaagtcccgatggttttttagaagtctgtacctgggtagatcaagttgccgcgttaaatgattcaaaaacgaggaaaaccacgagcgaaaccgtcagagccgtgttagatagtttatcagaaaagaagaaaagcagtccg

SEQ ID NO: 179 - DNA, 1050 bp, artificial sequence
  MHP77(L9-09)
atgaacaccaagtacaacaaggagttcctgctctacctggccggcatcgtggacagcgacggctgtatcattgcgcagatcaagccggaacagtgctacaagttcaagcaccggctcatgctgaccttcacagtgacccagaagacgagaaggcgctggttcctcgataagctgcatgacgagatcggggtgggctacgtccgtgaccgcgggtcggtgtccgactacatcctctcccagataaagcccctgcacaacttcctcacccagctccagccgttcctcaagctgaagcagaagcaggcggtcctcgtcctgaagatcatcgagcagctcccctcggccaaggagtccccggacaaattcctggaggtgtgcacgtgggtcgaccaggttgcggccctcaacgacagcaagacccgcaagacgacctcggagacggtgcgggcggtcctgctgtccctcccaggatccgtgggaggtctatcgccatctcaggcatccagcgccgcatcctcggcttcctcaagcccgggttcagggatctccgaagcactcagagctggagcaactaagtccaaagagtttttattatatttagcggggtttgtcgatggggatgggagtataatagccagtatacgccccgaacaatcgcgtaaatttaaacatcgcttagaattacgttttacggtcacgcaaaaaacccaacgtaggtggtttttagatgaattagtggatgaaataggcgtcgggtatgtatatgatcagggcagcgtcagtcattataggttaagtcaaataaaaccgttacataattttttaacgcaattacaacccttcttaaaattaaaacaaaaacaagccaatttagtgttaaaaataatagaacaattaccgagcgcgaaagaaagtcccgatggttttttagaagtctgtacctgggtagatcaaattgccgcgttaaatgattcaaaaacgaggaaaaccacgagcgaaaccgtcagagccgtgttagatagtttatcagaaaagaagaaaagcagtccg

SEQ ID NO: 180 - DNA, 1050 bp, artificial sequence
  MHP77(L9-10)
atgaacaccaagtacaacaaggagttcctgctctacctggccggcatcgtggacagcgacggctctatcattgcgcagatcaagccggaacagtgctacaagttcaagcaccggctcatgctgaccttcacagtgacccagaagacgaaaaggcgctggatcctcttgaagctgcatgacgagatcggggtgggctacgtccgtgaccgcgggtcggtgtccgactacatcctctcccagaaaaagcccctgcacaacttcctcacccagctccagccgttcctcaagctgaagcagaagcaggcgaacctcgtcctgaagatcatcgagcagctcccctcggccaaggagtccccggacggtttcctggaggtgtgcacgtgggtcgaccaggttgcggccctcaacgacagcaagacccgcaagacgacctcggagacggtgcgggcggtcctgctgtccctcccaggatccgtgggaggtctatcgccatctcaggcatccagcgccgcatcctcggcttcctcaagcccgggttcagggatctccgaagcactcagagctggagcaactaagtccaaagagtttttattatatttagcggggtttgtcgatggggatgggagtataatagccagtatacgccccgaacaatcgcgtaaatttaaacatcgcttagaattacgttttacggtcacgcaaaaaacccaacgtaggtggtttttagatgaattagtggatgaaataggcgtcgggtatgtatatgatcagggcagcgtcagtcattataggttaagtcaaataaaaccgttacataattttttaacgcaattacaacccttcttaaaattaaaacaaaaacaagccaatttagtgttaaaaataatagaacaattaccgagcgcgaaagaaagtcccgataaatttttagaagtctgtacctgggtagatcaagttgccgcgttaaatgattcaaaaacgaggaaaaccacgagcgaaaccgtcagagccgtgttagatagtttatcagaaaagaagaaaagcagtccg

SEQ ID NO: 181 - DNA, 1050 bp, artificial sequence
  MHP77(L9-11)
atgaacaccaagtacaacaaggagttcctgctctacctggccggcttcgtggacggcgacggctctatcattgcgcagatcaagccggaacagtgctacaagttcaagcaccggctcatgctgaccttcacagtgacccagaagacgaaaaggcgctggttcctcgataagctggtagacgagatcggggtgggctacgtccgtgaccgcgggtcggtgtccgactacatcctctcccagaaaaagcccctgcacaacttcctcacccagctccagccgttcctcaagctgaagcagaagcaggcgaacctcgtcctgaagatcatcgagcagctcccctcggccaaggagtccccggacggtttcctggaggtgtgcacgtgggtcgaccagattgcggccctcaacgacagcaagacccgcaagacgacctcggagacggtgcgggcggtcctgctgtccctcccaggatccgtgggaggtctatcgccatctcaggcatccagcgccgcatcctcggcttcctcaagcccgggttcagggatctccgaagcactcagagctggagcaactaagtccaaagagtttttattatatttagcggggtttgtcgatggggatgggagtataatagccagtatacgccccgaacaatcgcgtaaatttaaacatcgcttagaattacgttttacggtcacgcaaaaaacccaacgtaggtggtttttagataaattagtggatgaaataggcgtcgggtatgtatatgatcagggcagcgtcagtcattataggttaagtcaaataaaaccgttacataattttttaacgcaattacaacccttcttaaaattaaaacaaaaacaagccaatttagtgttaaaaataatagaacaattaccgagcgcgaaagaaagtcccgataaatttttagaagtctgtacctgggcagatcaaattgccgcgttaaatgattcaaaaacgaggaaaaccacgagcgaaaccgtcagagccgtgttagatagtttatcagaaaagaagaaaagcagtccg

SEQ ID NO: 182 - DNA, 1050 bp, artificial sequence
  MHP77(L9-12)
atgaacaccaagtacaacaaggagttcctgctctacctggccggcttcgtggacagcgacggctctatcattgcgcagatcaagccggaacagtgctacaagttcaagcaccggctcatgctgaccttcacagtgacccagaagacgcaaaggcgctggatcctcttgaagctggtagacgagatcggggtgggctacgtccgtgaccgcgggtcggtgtccgactacatcctctcccagataaagcccctgcacaacttcctcacccagctccagccgttcctcaagctgaagcagaagcaggcgaacctcgtcctgaagatcatcgagcagctcccctcggccaaggagtccccggacaaattcctggaggtgtgcacgtgggtcgaccagattgcggccctcaacgacagcaagacccgcaagacgacctcggagacggtgcgggcggtcctgctgtccctcccaggatccgtgggaggtctatcgccatctcaggcatccagcgccgcatcctcggcttcctcaagcccgggttcagggatctccgaagcactcagagctggagcaactaagtccaaagagtttttattatatttagcggggtttgtcgatggggatgggagtataatagccagtatacgccccgaacaatcgcgtaaatttaaacatcgcttagaattacgttttacggtcacgcaaaaaacccaacgtaggtggtttttagatgaattagtggatgaaataggcgtcgggtatgtatatgatcagggcagcgtcagtcattataggttaagtcaaataaaaccgttacataattttttaacgcaattacaaccctacttaaaattaaaacaaaaacaagccaatttagtgttaaaaataatagaacaattaccgagcgcgaaagaaagtcccgatggttttttagaagtctgtacctgggtagatcaaattgccgcgttaaatgattcaaaaacgaggaaaaccacgagcgaaaccgtcagagccgtgttagatagtttatcagaaaagaagaaaagcagtccg

SEQ ID NO: 183 - DNA, 1050 bp, artificial sequence
  MHP77(L112-03a)
atgaacaccaagtacaacaaggagttcctgctctacctggccggcttcgtggacggcgacggctccatcattgcgcagatcaagccggaacagtgctacaagttcaagcaccggctcatgctgaccttcacagtgacccagaagacgcagaggcgctggttcctcgacaagctggtcgacgagatcggggtgggctacgtccgtgaccgcggaaccgtatccgactacatcctctcccagatcaagcccctgcacaacttcctcacccagctccagccgttcctcaagctgaagcagaagcaggcgaacctcgtcctgaagatcatcgagcagctcccctcggccaaggagtccccggacaagttcctggaggtgtgcacgtgggtcgaccagatcgcggccctcaacgacagcaagacccgcaagacgacctcggagacggtgcgggcggtcctggactccctcccaggatccgtgggaggtctatcgccatctcaggcatccagcgccgcatcctcggcttcctcaagcccgggttcagggatctccgaagcactcagagctggagcaactaagtccaaagagtttttattatatatagcggggtttgtcgatgctgatgggagcattatagccagtatacgccccgaacaatcgcgtaaatttaaacatcgcttagaattacgttttacggtcacgcaaaagtcactgaggagatggtttttagataaattagtggatgaaataggcgtcgggtatgtgtatgatcagggcagcgtcagtcattataggttaagtcaaataaaaccgttacataattttttaacgcaattacaaccctttttaaaattaaaacaaaaacaagccaatttagtgttaaaaataatagaacaattaccgagcgcgaaagaaagtcccgataaatttttagaagtctgtacctgggtggatcaaatagccgcgttaaatgattcaaaaacgaggaaaaccacgagcgaaaccgtcagagccgtgttagatagtttatcagaaaagaagaaaagcagtccg

SEQ ID NO: 184 - DNA, 1050 bp, artificial sequence
  MHP77(L113-01)
atgaacaccaagtacaacaaggagttcctgctctacctggccggcttcgtggacggcgacggctccatcattgcgcagatcaagccggaacagtgctacaagttcaagcaccggctcatgctgaccttcacagtgacccagaagacgcagaggcgctggttcctcgacaagctggtcgacgagatcggggtgggctacgtccgtgaccgcggaaccgcatccgactacatcctctcccagatcaagcccctgcacaacttcctcacccagctccagccgttcctcaagctgaagcagaagcaggcgaacctcgtcctgaagatcatcgagcagctcccctcggccaaggagtccccggacaagttcctggaggtgtgcacgtgggtcgaccagatcgcggccctcaacgacagcaagacccgcaagacgacctcggagacggtgcgggcggtcctggactccctcccaggatccgtgggaggtctatcgccatctcaggcatccagcgccgcatcctcggcttcctcaagcccgggttcagggatctccgaagcactcagagctggagcaactaagtccaaagagtttttattatatttagcggggtttcttgatgctgatgggagtataatagccagtatacgccccgaacaatcgcgtaaatttaaacatcgcttagaattacgttttacggtcacgcaaaaaacccaacgtaggtggtttttagataaattagtggatgaaataggcgtcgggtatgtgtatgatcagggcagcgtcagtcattataggttaagtcaaataaaaccgttacataattttttaacgcaattacaaccctttttaaaattaaaacaaaaacaagccaatttagtgttaaaaataatagaacaattaccgagcgcgaaagaaagtcccgataaatttttagaagtctgtacctgggtggatcaaatagccgcgttaaatgattcaaaaacgaggaaaaccacgagcgaaaccgtcagagccgtgttagatagtttatcagaaaagaagaaaagcagtccg

SEQ ID NO: 185 - DNA, 1050 bp, artificial sequence
  MHP77(L13-01a)
atgaacaccaagtacaacaaggagttcctgctctacctggccggcttcgtggacggcgacggctccatcattgcgcagatcaagccggaacagcgctacaagttcaagcaccggctcatgctgaccttcacagtgacccagaagacgcagaggcgctggttcctcgacaagctggtcgacgagatcggggtgggctacgtccgtgaccgcgggtcggtgtccgactacatcctctcccagatcaagcccctgcacaacttcctcacccagctccagccgttcctcaagctgaagcagaagcaggcgaacctcgtcctgaagatcatcgagcagctcccctcggccaaggagtccccggacaagttcctgagggtgtgcacgtgggtcgaccggatcgcggccctcaacgacagcaagacccgcaagacgacctcggagacggtgcgggcggtcctggactctctcccaggatccgtgggaggtctatcgccatcccaggcatccagcgccgcatcctcggcttcctcaagcccgggttcagggatctccgaagcactcagagctggagcaactaagtccaaagagtttttattatatttagcggggtttgtcgatggggatgggagtataatagccagtatacgccccgaacaatcgcgtaaatttaaacatcgcttagaattacgttttacggtcacgcaaaaaacccaacgtaggtggtttttagataaattagtggatgaaattggcgtcgggtatgtgtatgatcagggcagcgtcagtcattataggttaagtcaaataaaaccgttacataattttttaacgcaattacaaccctttttaaaattaaaacaaaaacaagccaatttagtgttaaaaataatagaacaattaccgagcgcgaaagagagtcccgataaatttttagaagtctgtacctgggtggatcaaatagccgcgttaaatgattcaaaaacgaggaaaaccacgagcgaaaccgtcagagccgtgttagatagtttatcagaaaagaagaaaagcagtccg

SEQ ID NO: 186 - DNA, 1050 bp, artificial sequence
  MHP77(L13-02)
atggacaccaagtacaacaaggagttcctgctctacctggccggcttcgtggacggcgacggctccatcattgcgcagatcaggccggaacagtgctacaagttcaagcaccggctcatgctgaccctcacagtgacccagaagacgcagaggcgctggttcctcgacaagctggtcgacgagatcggggtgggctacgtccgtgaccgcgggtcggtgtccgactacatcctctcccagatcaagcccctgcacaacttcctcacccagctccagccgttcctcaagctgaagcagaagcaggcgaacctcgtcctgaagatcatcgagcagctcccctcggccaaggagtccccggacaagttcctggaggtgtgcacgtgggtcgaccagatcgcggccctcaacgacagcaagacccgcaagacgacctcggagacggtgcgggcggtcctggactccctcccaggatccgtggggggtctatcgccatctcaggcatccagcgccgcatcctcggcttcctcaagcccgggttcagggatctccgaagcactcagagctggagcaactaagtccaaagagtttttattatatttagcggggtttgtcgatggggatgggagtataatagccagtatacgccccgaacaatcgcgtaaatttaaacatcgcttagaattacgttttacggtcacgcaaaaaacccaacgtaggtggtttttagataaattagtggatgaaataggcgtcgggtatgtgtatgatcagggcagcgtcagtcattataggttaagtcaaataaaaccgttacataatttcttaacgcaattacaaccctttttaaaattaaaacaaaaacaagccaatttagtgttaaaaataatagaacaattaccgagcgcgaaagaaagtcccgataaatttttagaagtctgtacctgggcggatcaaatagccgcgttaaatgattcaaaaacgaggaaaaccacgagcgaaaccgtcagagccgtgttagatagtctatcagaaaagaagaaaagcagtccg

SEQ ID NO: 187 - DNA, 1050 bp, artificial sequence
  MHP77(L13-04)
atgaacaccaagtacaacaaggagttcctgctctacctggccggcttcgtggacggcgacggctccatcattgcgcagatcaagccggaacagtgctacaagttcaagcaccggctcatgctgaccttcacagtgacccagaagacgcagaggcgctggttcctcgacaagctggtcgacgagatcggggtgggctacgtccgtgaccgcgggtcggtgtccgactacatcctctcccagatcaagcccctgcacaacttcctcacccagctccagccgttcctcaagctgaagcagaagcaggcgaacctcgtcctgaagatcatcgagcagctcccctcggccaaggagtccccggacaagttcctggaggtgtgcacgtgggtcgaccagatcgcggccctcaacgacagcaagacccgcaagacgacctcggagacggtgcgggcggtcctggactccctcccaggatccgtgggaggtctatcgccatcccaggcatccagcgccgcatcctcggcttcctcaagcccgggttcagggatctccgaagcactcagagctggagcaactaagtccaaagagtttttattatatttagcggggtttgtcgatggggatgggagtataatagccagtatacgccccgaacaatcgcgtaaatttaaacatcgcttagaattacgttttacggtcacgcaaaaaacccaacgtaggtggtttttagataaattagtggatgaaataggcgtcgggtatgtgtatgatcagggcagcgtcagtcattataggttaagtcaaataaaaccgttacataattttttaacgcaattacaaccctttttaaaattaaaacaaaaacaagccaatttagtgttaaaaataatagaacaattaccgagcgcgaaagaaagtcccgataaatttttagaagtctgtacctgggcggatcaaatagccgcgttaaatgattcaaaaacgaggaaaaccacgagcgaaaccgtcagagccgtgttagatagtttatcagaaaagaagaaaagcagtccg

SEQ ID NO: 188 - DNA, 1050 bp, artificial sequence
  MHP77(L13-06)
atgaacaccaagtacaacaaggagttcctgctctacctggccggcttcgtggacggcgacggctccatcattgcgcagatcaagccgggacagtgctacaagttcaagcaccggctcatgctgaccttcacagtgacccagaagacgcagaggcgctggttcctcgacaagctggtcgacgagattggggtgggctacgtccgtgaccgcgggtcggcgtccgactacatcctctcccagatcaagcccctgcacaacttcctcacccagctccagccgttcctcaagctgaagcagaagcaggcgaacctcgtcctgaagatcatcgagcggctcccctcggccaaggagtccccggacaagttcctggaggtgtgcacgtgggtcgaccagatcgcggccctcaacgacagcaagacccgcaagacgacctcggagacggtgcgggcggccctggactccctcccaggatccgtgggaggtctatcgccatctcaggcatccagcgccgcatcctcggcttcctcaagcccgggttcagggatctccgaagcactcagagctggagcaactaagtccaaagagtttttattatatttagcggggtttgtcgatggggatgggagtataatagccagtatacgccccgaacaatcgcgtaaatttaaacatcgcttagaattacgttttacggtcacgcaaaaaacccaacgtaggtggtttttagataaattagtggatgaaataggcgtcgggtatgtgtatgatcagggcagcgtcagtcattataggttaagtcaaataaaaccgttacataattttttaacgcaattacaaccctttttaaaattaaaacaaaaacaagccaatttagtgttaaaaataatagaacaattaccgagcgcgaaagaaagtcccgataaatttttagaagtctgtacctgggtggatcaaatagccgcgttaaatgattcaaaaacgaggaaaaccacgagcgaagccgtcagagccgtgttagatagttcatcagaaaagaagaaaagcagtccg

SEQ ID NO: 189 - DNA, 1050 bp, artificial sequence
  MHP77(L13-08a)
atgaacaccaagtacaacaaggagttcctgctctacctggccggcttcgtggacggcgacggctccatcattgcgcagatcaagccggaacagcgctacaagttcaagcaccggctcatgctgaccttcacagtgacccagaagacgcggaggcgctggttcctcgacaagctggccgacgagatcggggtgggctacgtccgtgaccgcgggtcggtgtccgactacatcctctcccagatcaagcccctgcacgacttcctcacccagctccagccgttcctcaagctgaagcagaagcaggcgaacctcgtcctgaagatcatcgagcagctctcctcggccaaggagtccccggacaagttcctggaggtgtgcacgtgggtcgaccagatcgcggccctcaacgacagcaagacccgcaagacgacctcggagacggtgcgggcggtcctggactccctcccaggatccgtgggaggtctatcgccatctcaggcatccagcgccgcatcctcggcttcctcaagcccgggttcagggatctccgaagcactcagagctggagcaactaagtccaaagagtttttattatatttagcggggtttgtcgatggggatgggagtataatagccagtatacgccccgaacagtcgcgtaaatttaaacatcgcttagaattacgttttacggtcacgcaaaaaacccaacgtaggtggtttttagataaattagtggatgaaataggcgtcgggtatgtgtatgatcagggcagcgtcagtcattataggttaagtcaaataaaaccgttacataattttttaacgcaattacaaccctttttaaaattaaaacaaaaacaagccaatttagtgttaaaaataatagaacaattaccgagcgcgaaagaaagtcccgataaatttttagaagtctgtacctgggtggatcaaatagccgcgttaaatgattcaaaaacgaggaaaaccacgagcgaaaccgtcagagccgtgttagatagtttatcagaaaagaagaaaagcagtccg

SEQ ID NO: 190 - DNA, 1050 bp, artificial sequence
  MHP77(L13-10B1)
atgaacaccaagtacaacaaggagttcctgctccacctggccggcttcgtggacggcgacggctccatcattgcgcagatcaagccggaacagtgctacaagttcaagcaccggctcatgctgaccttcacagtgacccagaagacgcagaggcgctggttcctcgacaagctggtcgacgagatcggggtgggctacgtccgtgaccgcgggtcggtgtccgactacatcctctcccagatcaagcccctgcacaacttcctcacccagctccagccgttcctcaagctgaagcagaagcaggcgaacctcgccctgaagatcatcgagcagctcccctcggccaaggagtccccggacaagttcctggaggtgtgcacgtgggtcgaccagatcgcggccctcaacgacagcaagacccgcaagacgacctcggagacggtgcgggcggtcctggactccctcccagggtccgtgggaggtctatcgccatctcaggcatccagcgccgcatcctcggcttcctcaagcccgggttcagggatctccgaagcactcagagctggagcaactaagtccaaagagtttttattatatttagcggggtttgtcgatggggatgggagtataatggccagtatacgccccgaacaatcgcgtaaatttaaacatcgcttagaattacgttttacggtcacgcaaaaaacccaacgtaggtggtttttagataaattagtggatgagataggcgtcgggtatgtgtatgatcagggcagcgtcagtcattataggttaagtcaaataaaaccgttacataattttttaacgcaattacaaccctttttaaaattaaaacaaaaacaagccaatttagtgttaaaaataatagaacaattaccgagcgcgaaagaaagtcccgataaatttttagaagtctgtacctgggtggatcaaatagccgcgttaaatgattcaaaaacgaggaaaaccacgagcgaaaccgtcagagccgtgttagatagtttatcagaaaagaagaaaagcagtccg

SEQ ID NO: 191 - DNA, 1050 bp, artificial sequence
  MHP77(L13-11)
atgaacaccaagtacaacaaggagttcctgctctacctggccggcttcgtggacggcgacggctccatcattgcgcagatcaagccggaacagcgctacaagttcaagcaccggctcatgctgaccttcacagtgacccagaagacgcagaggcgctggttcctcgacaagctggtcgacgagatcggggtgggctacgtccgtgaccgcgggtcggtgtccgactacatcctctcccagatcaagcccctgcacaacttcctcacccagctccagccgttcctcaagctgaagcagaagcaggcgaacctcgtcctgaagatcatcgagcagctccccccggccaaggagtccccggacaagttcctggaggtgtgcacgtgggtcgaccaggtcgcggccctcaacgacagcaagacccgcaagacgacctcggagacggtgcgggcggtcctggactccctcccaggatccgtgggaggtctatcgccatctcaggcatccagcgccgcatcctcggcttcctcaagcccgggttcagggatctccgaagcactcagagctggagcaactaagtccaaagagtttttattatatttagcggggtttgtcgatggggacgggagcataatagccagtatacgccccgaacaatcgcgtaaatttaaacatcgcttagaattacgttttacggtcacgcaaaaaacccaacgtaggtggtttttagataaattagtggatgaaataggcgtcgggtatgtgtatgatcagggcagcgtcagtcattataggttaagtcaaataaaaccgttacataattttttaacgcaattacaaccctttttaaaattaaaacaaaaacaagccaatttagtgttaaaaataatagaacaattaccgagcgcgaaagaaagtcccgataaatttttagaagtctgtacctgggtggatcaaatagccgcgttaaatgattcaaaaacgaggaaaaccacgagcgaaaccgtcagagccgtgttagatagtttatcagaaaagaagaaaagcagtccg

SEQ ID NO: 192 - DNA, 1050 bp, artificial sequence
  MHP77(L13-12)
atgaacaccaagtacaacaaggagttcctgctctacctggccggcttcgtggacggcgacggctccatcattgcgcagatcaagccggaacagtgctacaagttcaagcaccggctcatgctgaccttcacagtgacccagaagacgcagaggcgctggatcctcgacaagctggtcgacgagatcggggtgggctacgtccgtgaccgcgggtcggtgtccgactacatcctctcccagatcaagcccctgcacaacttcctcacccagctccagccgttcctcaagctgaagcagaagcaggcgaacctcgtcctgaagatcatcgagcagctcccctcggccaaggagtccccggacaagttcctggaggtgtgcacgtgggtcgaccagatcgcggccctcaacgacagcaagacccgcaagacgacctcggagacggtgcgggcggtcctggactccctcccaggatccgtgggaggtctatcgccatctcaggcatccagcgccgcatcctcggcttcctcaagcccgggttcaggggtctccgaagcactcagagctggagcaactaagtccaaagagtttttattatatttagcggggtttgtcgatggggatgggagtataatagccagtatacgccccgaacaatcgcgtaaatttaaacatcgcttagaattacgttttacggtcacgcaaaaaacccaacgtaggtggtttttagataaattagtggatgaaataggcgtcgggtatgtgtatgatcagggcagcgtcagtcattataggttaagtcaaataaaaccgttacataattttttaacgcaattacaaccctttttaaaattaaaacaaaaacaagccaacttagtgttaaaaataatagaacaattaccgagcgcgaaagaaagtcccgataaatttttagaagtctgtacctgggtggatcaaatagccgcgttaaatgattcaaaaacgaggaaaaccacgagcgaaaccgtcagagccgtgttaggtagtttatcagaaaagaagaaaagcagtccg

SEQ ID NO: 193 - DNA, 1050 bp, artificial sequence
  MHP77(L15-02)
atgaacaccaagtacaacaaggagttcctgctctacctggccggcttcgtggacggcgacggctccatcattgcgcagatcaagccggaacagcgctacaagttcaagcaccggctcatgctgaccttcacagtgacccagaagacgcagaggcgctggttcctcgacaagctggtcgacgagatcggggtgggctacgtccgtgaccgcgggtcggcgtccgactacatcctctcccagatcaagcccctgcacaacttcctcacccagctccagccgttcctcaagctgaagcagaagcaggcgaacctcgccctgaagatcatcgagcagctcccctcggccaaggagtccccggacaagttcctggaggtgtgcacgtgggtcgaccagatcgcggccctcaacgacagcaagacccgcaagacgacctcggagacggtgcgggcggtcctggactccctcccaggatccgtggggggtctatcgccatctcaggcgtccagcgccgcatcctcggcttcctcaagcccgggttcagggatctccgaagcactcagagctggagcaactaagtccaaagagtttttattatatttagcggggtttgtcgatggggatgggagtataatagccagtatacgccccgaacaatcgcgtaaatttaaacatcgcttagaattacgttttacggtcacgcaaaaaacccaacgtaggtggtttttagataaattagtggatgaaataggcgtcgggtatgtgtatgatcagggcagcgtcagtcattataggttaagtcaaataaaaccgttacataattttttaacgcaattacaaccctttttaaaattaaaacaaaaacaagccaatttagtgttaaaaataatagaacaattaccgagcgcgaaagaaagtcccgataaatttttagaagtctgtacctgggtggatcaaatagccgcgttaaatgattcaaaaacgaggaaaaccacgagcgaaaccgtcagagccgtgttaggtagtttatcagaaaagaagaaaagcagtccg

SEQ ID NO: 194 - DNA, 1050 bp, artificial sequence
  MHP77(L15-03)
atgaacaccaagtacaacaaggagttcctgctccacctggccggcttcgtggacggcgacggctccatcattgcgcagatcaagccggaacagcgctacaagttcaagcaccggctcatgctgaccttcacagtgacccagaagacgcagaggcgctggttcctcgacaagctggccgacgagatcggggtgggctacgtccgtgaccgcgggtcggcgtccgactacatcctctcccagatcaagcccctgcacaacttcctcacccagctccagccgttcctcaagctgaagcagaagcaggcgaacctcgtcctgaagatcatcgagcagctcccctcggccaaggagtccccggacaagttcctggaggtgtgcacgtgggtcgaccagatcgcggccctcaacgacagcaagacccgcaagacgacctcggagacggtgcgggcggtcctggactctctcccagggtccgtgggaggtctatcgccatctcaggcatccagcgccgcatcctcggcttcctcaagcccgggttcagggatctccgaagcactcagagctggagcaactaagtccaaagagtttttattatatttagcggggtttgtcgatggggatgggagtataatagccagtatacgccccgaacaatcgcgtaaatttaaacatcgcttagaattacgttttacggtcacgcaaaaaacccaacgtaggtggtttttagataaattagtggatgaaataggcgtcgggtatgtgtatgatcagggcagcgtcagtcattataggttaagtcaaataaaaccgttacataattttttaacgcaattacaaccctttttaaaattaaaacaaaaacaagccaacttagtgttaaaaataatagaacaattaccgagcgcgaaagaaagtcccgataaatttttagaagtctgtacctgggtggatcaaatagccgcgttaaatgattcaaaaacgaggaaaaccacgagcgaaaccgtcagagccgtgttagatagtttatcagaaaagaagaaaagcagtccg

SEQ ID NO: 195 - DNA, 1050 bp, artificial sequence
  MHP77(L15-05)
atgaacaccaagtacaacaaggagttcctgctctacctggccggcttcgtggacggcgacggctccatcattgcgcagatcaagccggaacagcgctacaagttcaagcaccggctcatgctgaccttcacagtgacccagaagacgcagcggcgctggatcctcgacaagctggtcgacgagatcggggtgggctacgtccgtgaccgcgggtcggcgtccgactacatcctctcccagatcaagcccctgcacaacttcctcacccagctccagccgttcctcaagctgaagcagaagcaggcgaacctcgtcctgaagatcatcgagcagctcccctcggccaaggagtccccggacaagttcctggaggtgtgcacgtgggtcgaccagatcgcggccctcaacgacagcaagacccgcaagacgacctcggagacggtgcgggcggtcctggactccctcccaggatccgtgggaggtctatcgccatctcaggcatccagcgccgcatcctcggcttcctcaagcccgggttcagggatctccgaagcactcagagctggagcaactaagtccaaagagtttttattatatttagcggggtttgtcgatggggatgggagtataatagccagtatacgccccgaacagtcgcgtaaatttaaacatcgcttagaattacgttttacggtcacgcaaaaaacccaacgtaggtggtttttagataaattagtggatgaaattggcgtcgggtatgtgtatgatcagggcagcgtcagtcattataggttaagtcaaataaaaccgttacataattttttaacgcaattacaaccctttttaaaattaaaacaaaaacaagccaatttagtgttaaaaataatagaacaattaccgagcgcgaaagaaagtcccgataaatttttagaagtctgtacctgggtggatcaaatagccgcgttaaatgattcaaaaacgaggaaaaccacgagcgaaaccgtcagagccgtgttagatagtttatcagaaaagaagaaaagcagtccg

SEQ ID NO: 196 - DNA, 1050 bp, artificial sequence
  MHP77(L15-06)
atgaacaccaagtacaacaaggagttcctgctccacctggccggcttcgtggacggcgacggctccatcattgcgcagatcaagccggaacagcgctacaagttcaagcaccggctcatgctgaccttcacagtgacccagaagacgcagaggcgctggttcctcgacaagctggtcgacgagatcggggtgggctacgtccgtgaccgcgggtcggcgtccgactacatcctctcccagatcaagcccctgcacaacttcctcacccagctccagccgttcctcaagctgaagcagaagcaggcgaacctcgtcctgaagatcatcgagcagctcccctcggccaaggagtccccggacaagttcctggaggtgtgcacgtgggccgaccagatcgcggccctcaacgacagcaagacccgcaagacgacctcggagacggtgcgggcggtcctggactccctcccagggtccgtgggaggtctatcgccatctcaggcatccagcgccgcatcctcggcttcctcaagcccgggttcagggatctccgaagcactcagagctggagcaactaagtccaaagagtttttattatatttagcggggtttgtcgatggggatgggagtataatagccagtatacgccccgaacaatcgcgtaaatttaaacatcgcttagaattacgttttacggtcacgcaaaaaacccaacgtaggtggtttttagataaattagtggatgaaattggcgtcgggtatgtgtatgatcagggcagcgtcagtcattataggttaagtcaaataaaaccgttacataatttcttaacgcaattacaaccctttttaaaattaaaacaaaaacaagccaatttagtgttaaaaataatagaacaattaccgagcgcgaaagaaagtcccgataaatttttagaagtctgtacctgggtggatcaaatagccgcgttaaatgattcaaaaacgaggaaaaccacgagcgaaaccgtcagagccgtgttagatagtttatcagaaaagaagaaaagcagcccg

SEQ ID NO: 197 - DNA, 1050 bp, artificial sequence
  MHP77(L15-08)
atgaacaccaagtacaacaaggagttcctgctctacctggccggcttcgtggacggcgacggctccatcattgcgcagatcaagccggaacagcgctacaagttcaagcaccggctcatgctgaccttcacagtgacccagaagacgcggaggcgctggttcctcgacaagctggtcgacgagatcggggtgggctacgtccgtgaccgcgggtcggtgtccgactacatcctctcccagatcaagcccctgcacaacttcctcacccagctccagccgttcctcaagctgaagcagaagcaggcgaacctcgtcctgaagatcatcgagcagctcccctcggccaaggagtccccggacaagttcctggaggtgtgcacgtgggtcgaccggatcgcggccctcaacgacagcaagacccgcaagacgacctcggagacggtgcgggcggtcctggactccctcccaggatccgtgggaggtctatcgccatctcaggcgtccagcgccgcatcctcggcttcctcaagcccgggttcagggatctccgaagcactcagagctggagcaactaagtccaaagagtttttattatatttagcggggtttgtcgatggggatgggagtataatagccagtatacgccccgaacaatcgcgtaaatttaaacatcgcttagaattacgttttacggtcacgcaaaaaacccaacgtaggtggtttttagataaattagtggatgaaataggcgtcgggtatgtgtatgatcagggcagcgtcagtcattataggttaagtcgaataaaaccgttacataattttttaacgcaattacaaccctttttaaaattaaaacaaaaacaagccaatttagtgttaaaaataatagaacaattaccgagcgcgaaagagagtcccgataaatttttagaagtctgtacctgggtggatcaaatagccgcgttaaatgattcaaaaacgaggaaaaccacgagcgaaaccgtcagagccgtgtttgatagtttatcagaaaagaagaaaagcagcccg

SEQ ID NO: 198 - DNA, 1050 bp, artificial sequence
  MHP77(L15-10)
atgaacaccaagtacaacaaggagttcctgctccacctggccggcttcgtggacggcgacggctccatcattgcgcagatcaagccggaacagtgctacaagttcaagcaccggctcatgctgaccttcacagtgacccagaagacgcggaggcgctggttcctcgacaagctggccgacgagatcggggtgggctacgtccgtgaccgcgggtcggcgtccgactacatcctctcccagatcaagcccctgcacaacttcctcacccagctccagccgttcctcaagctgaagcagaagcaggcgaacctcgtcctgaagatcatcgagcagctcccctcggccaaggagtccccggacaagttcctggaggtgtgcacgtgggtcgaccagatcgcggccctcaacgacagcaagacccgcaagacgacctcggagacggtgcgggcggtcctggactctctcccaggatccgtgggaggtctatcgccatctcaggcatccagcgccgcatcctcggcttcctcaagcccgggttcagggatctccgaagcactcagagctggagcaactaagtccaaagagtttttattatatttagcggggtttgtcgatggggatgggagtataatagccagtatacgccccgaacaatcgcgtaaatttaaacatcgcttagaattacgttttacggtcacgcaaaaaacccaacgtaggtggtttttagataaattagtggatgaaataggcgtcgggtatgtgtatgatcagggcagcgtcagtcattataggttaagtcaaataaaaccgttacataattttttaacgcaattacaaccctttttaaaattaaaacaaaaacaagccaatttagtgttaaaaataatagaacaattaccgagcgcgaaagagagtcccgataaatttttagaagtctgtacctgggtggatcaaatagccgcgttaaatgattcaaaaacgaggaaaaccacgagcgaaaccgtcagagccgtgttagatagtttatcagaaaagaagaaaagcagtccg

SEQ ID NO: 199 - DNA, 1050 bp, artificial sequence
  MHP77(L15-11)
atgaacaccaagtacaacaaggagttcctgctctacctggccggcttcgtggacggcgacggctccatcattgcgcagatcaggccggaacagtgctacaagttcaagcaccggctcatgctgaccttcacagtgacccagaagacgcagaggcgctggatcctcgacaagctggtcgacgagatcggggtgggctacgtccgtgaccgcgggtcggtgtccgactacatcctctcccagatcaagcccctgcacaacttcctcacccagctccagccgttcctcaagctgaagcagaagcaggcgaacctcgtcctgaagatcatcgagcagctcccctcggccaaggagtccccggacaagttcctggaggtgtgcacgtgggtcgaccagatcgcggccctcaacgacagcaagacccgcaagacgacctcggagacggtgcgggcggtcctggactccctcccaggatccgtgggaggtctatcgccatctcaggcatccagcgccgcatcctcggcttcctcaagcccgggttcagggatctccgaagcactcagagctggagcaactaagtccaaagagtttttattatatttagcggggtttgtcgatggggatgggagtataatggccagtatacgccccgaacaatcgcgtaaatttaaacatcgcttagaattacgttttacggtcacgcaaaaaacccaacgtaggtggtttttagataaattagtggatgaaataggcgtcgggtatgtgtatgatcagggcagcgtcagtcattataggttaagtcaaataaaaccgttacataatttcttaacgcaattacaaccctttttaaaattaaaacaaaaacaagccaatttagtgttaaaaataatagaacaattaccgagcgcgaaagaaagtcccgataaatttttagaagtctgtacctgggtggatcaaatagccgcgttaaatgattcaaaaacgaggaaaaccacgagcgaaaccgtcagagccgtgttagatagtctatcagaaaagaagaaaagcagtccg

SEQ ID NO: 200 - DNA, 1050 bp, artificial sequence
  MHP77(L15-12)
atgaacaccaagtacaacaaggagttcctgctccacctggccggcttcgtggacggcgacggctccatcatcgcgcagatcaagccggaacagtgctacaagttcaagcaccggctcatgctgaccttcacagtgacccagaagacgcagcggcgctggttcctcgacaagctggtcgacgagatcggggtgggctacgtccgtgaccgcgggtcggcgtccgactacatcctctcccagatcaagcccctgcacaacttcctcacccagctccagccgttcctcaagctgaagcagaagcaggcgaacctcgtcctgaagatcatcgagcagctcccctcggccaaggagtccccggacaagttcctggaggtgtgcacgtgggtcgaccagatcgcggccctcaacgacagcaagacccgcaagacgacctcggagacggtgcgggcggtcctggactccctcccaggatccgtgggaggtctatcgccatctcaggcatccagcgccgcatcctcggcttcctcaagcccgggttcaggggtctccgaagcactcagagctggagcaactaagtccaaagagtttttattatatttagcggggtttgtcgatggggatgggagtataatagccagtatacgccccgaacagtcgcgtaaatttaaacatcgcttagaattacgttttacggtcacgcaaaaaacccaacgtaggtggtttttagataaattagtggatgaaataggcgtcgggtatgtgtatgatcagggcagcgtcagtcattataggttaagtcaaataaaaccgttacataatttcttaacgcaattacaaccctttttaaaattaaaacaaaaacaagccaatttagtgttaaaaataatagaacaattaccgagcgcgaaagaaagtcccgataaatttttagaagtctgtacctgggtggatcaaatagccgcgttaaatgattcaaaaacgaggaaaaccacgagcgaaaccgtcagagccgtgttagatagtttatcagaaaagaagaaaagcagtccg

SEQ ID NO: 201 - DNA, 1050 bp, artificial sequence
  MHP77(L15-13)
atgaacaccaagtacaacaaggagttcctgctccacctggccggcttcgtggacggcgacggctccatcattgcgcagatcaagccggaacagcgctacaagttcaagcaccggctcatgctgaccttcacagtgacccagaagacgcagaggcgctggttcctcgacaagctggccgacgagatcggggtgggctacgtccgtgaccgcgggtcggcgtccgactacatcctctcccagatcaagcccctgcacaacttcctcacccagctccagccgttcctcaagctgaagcagaagcaggcgaacctcgtcctgaagatcatcgagcagctcccctcggccaaggagtccccggacaagttcctggaggtgtgcacgtgggccgaccagatcgcggccctcaacgacagcaagacccgcaagacgacctcggagacggtgcgggcggtcctggactccctcccaggatccgtgggaggtctatcgccatcccaggcatccagcgccgcatcctcggcttcctcaagcccgggttcagggatctccgaagcactcagagctggagcaactaagtccaaagagtttttattatatttagcggggtttgtcgatggggatgggagtataatagccagtatacgccccgaacaatcgcgtaaatttaaacatcgcttagaattacgttttacggtcacgcaaaaaacccaacgtaggtggtttttagataaattagtggatgaaattggcgtcgggtatgtgtatgatcagggcagcgtcagtcattataggttaagtcaaataaaaccgttacataattttttaacgcaattacaaccctttttaaaattaaaacaaaaacaagccaacttagtgttaaaaataatagaacaattaccgagcgcgaaagaaagtcccgataaatttttagaagtctgtacctgggtggatcaaatagccgcgttaaatgattcaaaaacgaggaaaaccacgagcgaaaccgtcagagccgtgttagatagtttatcagaaaagaagaaaagcagtccg

SEQ ID NO: 202 - DNA, 1050 bp, artificial sequence
  MHP77(L15-15)
atgaacaccaagtacaacaaggagttcctgctccacctggccggcttcgtggacggcgacggctccatcattgcgcagatcaagccggaacagcgctacaagttcaagcaccggctcatgctgaccttcacagtgacccagaagacgcagaggcgctggttcctcgacaagctggtcgacgagatcggggtgggctacgtccgtgaccgcgggtcggtgtccgactacatcctctcccagatcaagcccctgcacaacttcctcacccagctccagccgttcctcaagctgaagcagaagcaggcgaacctcgccctgaagatcatcgagcagctctcctcggccaaggagtccccggacaagttcctgagggtgtgcacgtgggtcgaccagatcgcggccctcaacgacagcaagacccgcaagacgacctcggagacggtgcgggcggtcctggactccctcccagggtccgtgggaggtctatcgccatctcaggcgtccagcgccgcatcctcggcttcctcaagcccgggttcagggatctccgaagcactcagagctggagcaactaagtccaaagagtttttattatatttagcggggtttgtcgatggggatgggagtataatggccagtatacgccccgaacaatcgcgtaaatttaaacatcgcttagaattacgttttacggtcacgcaaaaaacccaacgtaggtggtttttagataaattagtggatgagataggcgtcgggtatgtgtatgatcagggcagcgtcagtcattataggttaagtcaaataaaaccgttacataattttttaacgcaattacaaccctttttaaaattaaaacaaaaacaagccaatttagtgttaaaaataatagaacaattaccgagcgcgaaagaaagtcccgataaatttttagaagtctgtacctgggtggatcaaatagccgcgttaaatgattcaaaaacgaggaaaaccacgagcgaaaccgtcagagccgtgttagatagtttatcagaaaagaagaaaagcagtccg

SEQ ID NO: 203 - DNA, 1050 bp, artificial sequence
  MHP77(L15-16)
atgaacaccaagtacaacaaggagttcctgctctacctggccggcttcgtggacggcgacggctccatcattgcgcagatcaggccggaacagtgctacaagttcaagcaccggctcatgctgaccttcacagtgacccagaagacgcagaggcgctggttcctcgacaagctggtcgacgagatcggggtgggctacgtccgtgaccgcgggtcggtgtccgactacatcctctcccagatcaagcccctgcacaacttcctcacccagctccagccgttcctcaagctgaagcagaagcaggcgaacctcgccctgaagatcatcgagcagctcccctcggccaaggagtccccggacaagttcctgagggtgtgcacgtgggtcgaccagatcgcggccctcaacgacagcaagacccgcaagacgacctcggagacggtgcgggcggtcctggactctctcccaggatccgtggggggtctatcgccatctcaggcatccagcgccgcatcctcggcttcctcaagcccgggttcagggatctccgaagcactcagagctggagcaactaagtccaaagagtttttattatatttagcggggtttgtcgatggggatgggagtataatagccagtatacgccccgaacaatcgcgtaaatttaaacatcgcttagaattacgttttacggtcacgcaaaaaacccaacgtaggtggtttttagataaattagtggatgaaataggcgtcgggtatgtgtatgatcagggcagcgtcagtcattataggttaagtcaaataaaaccgttacataattttttaacgcaattacaaccctttttaaaattaaaacaaaaacaagccaacttagtgttaaaaataatagaacaattaccgagcgcgaaagaaagtcccgataaatttttagaagtctgtacctgggtggatcaaatagccgcgttaaatgattcaaaaacgaggaaaaccacgagcgaaaccgtcagagccgtgtttgatagtttatcagaaaagaagaaaagcagcccg

SEQ ID NO: 204 - DNA, 1050 bp, artificial sequence
  MHP77(L15-18)
atgaacaccaagtacaacaaggagttcctgctccacctggccggcttcgtggacggcgacggctccatcattgcgcagatcaagccggaacagcgctacaagttcaagcaccggctcatgctgaccttcacagtgacccagaagacgcagaggcgctggttcctcgacaagctggtcgacgagatcggggtgggctacgtccgtgaccgcgggtcggtgtccgactacatcctctcccagatcaagcccctgcacgacttcctcacccagctccagccgttcctcaagctgaagcagaagcaggcgaacctcgtcctgaagatcatcgagcagctcccctcggccaaggagtccccggacaagttcctgagggtgtgcacgtgggtcgaccagatcgcggccctcaacgacagcaagacccgcaagacgacctcggagacggtgcgggcggtcctggactccctcccaggatccgtgggaggtctatcgccatcccaggcatccagcgccgcatcctcggcttcctcaagcccgggttcaggggtctccgaagcactcagagctggagcaactaagtccaaagagtttttattatatttagcggggtttgtcgatggggatgggagtataatagccagtatacgccccgaacaatcgcgtaaatttaaacatcgcttagaattacgttttacggtcacgcaaaaaacccaacgtaggtggtttttagataaattagtggatgaaataggcgtcgggtatgtgtatgatcagggcagcgtcagtcattataggttaagtcaaataaaaccgttacataatttcttaacgcaattacaaccctttttaaaattaaaacaaaaacaagccaatttagtgttaaaaataatagaacaattaccgagcgcgaaagaaagtcccgataaatttttagaagtctgtacctgggtggatcaaatagccgcgttaaatgattcaaaaacgaggaaaaccacgagcgaaaccgtcagagccgtgttagatagtttatcagaaaagaagaaaagcagtccg

SEQ ID NO: 205 - DNA, 1050 bp, artificial sequence
  MHP77(L15-20)
atgaacaccaagtacaacaaggagttcctgctctacctggccggcttcgtggacggcgacggctccatcattgcgcagatcaagccggaacagcgctacaagttcaagcaccggctcatgctgaccttcacagtgacccagaagacgcagaggcgctggttcctcgacaagctggtcgacgagatcggggtgggctacgtccgtgaccgcgggtcggcgtccgactacatcctctcccagatcaagcccctgcacaacttcctcacccagctccagccgttcctcaagctgaagcagaagcaggcgaacctcgccctgaagatcatcgagcagctcccctcggccaaggagtccccggacaagttcctggaggtgtgcacgtgggtcgaccagatcgcggccctcaacgacagcaagacccgcaagacgacctcggagacggtgcgggcggtcctggactccctcccagggtccgtgggaggtctatcgccatcccaggcatccagcgccgcatcctcggcttcctcaagcccgggttcagggatctccgaagcactcagagctggagcaactaagtccaaagagtttttattatatttagcggggtttgtcgatggggatgggagtataatagccagtatacgccccgaacaatcgcgtaaatttaaacatcgcttagaattacgttttacggtcacgcaaaaaacccaacgtaggtggtttttagataaattagtggatgaaataggcgtcgggtatgtgtatgatcagggcagcgtcagtcattataggttaagtcgaataaaaccgttacataattttttaacgcaattacaaccctttttaaaattaaaacaaaaacaagccaatttagtgttaaaaataatagaacaattaccgagcgcgaaagaaagtcccgataaatttttagaagtctgtacctgggtggatcaaatagccgcgttaaatgattcaaaaacgaggaaaaccacgagcgaaaccgtcagagccgtgttagatagtttatcagaaaagaagaaaagcagtccg

SEQ ID NO: 206 - DNA, 1050 bp, artificial sequence
  MHP77(L15-21)
atgaacaccaagtacaacaaggagttcctgctctacctggccggcttcgtggacggcgacggctccatcattgcgcagatcaagccggaacagtgctacaagttcaagcaccggctcatgctgaccttcacagtgacccagaagacgcagaggcgctggatcctcgacaagctggtcgacgagatcggggtgggctacgtccgtgaccgcgggtcggcgtccgactacatcctctcccagatcaagcccctgcacaacttcctcacccagctccagccgttcctcaagctgaagcagaagcaggcgaacctcgtcctgaagatcatcgagcagctctcctcggccaaggagtccccggacaagttcctggaggtgtgcacgtgggtcgaccagatcgcggccctcaacgacagcaagacccgcaagacgacctcggagacggtgcgggcggtcctggactccctcccaggatccgtgggaggtctatcgccatctcaggcatccagcgccgcatcctcggcttcctcaagcccgggttcaggggtctccgaagcactcagagctggagcaactaagtccaaagagtttttattatatttagcggggtttgtcgatggggatgggagtataatagccagtatacgccccgaacagtcgcgtaaatttaaacatcgcttagaattacgttttacggtcacgcaaaaaacccaacgtaggtggtttttagataaattagtggatgaaataggcgtcgggtatgtgtatgatcagggcagcgtcagtcattataggttaagtcaaataaaaccgttacataattttttaacgcaattacaaccctttttaaaattaaaacaaaaacaagccaatttagtgttaaaaataatagaacaattaccgagcgcgaaagagagtcccgataaatttttagaagtctgtacctgggcggatcaaatagccgcgttaaatgattcaaaaacgaggaaaaccacgagcgaaaccgtcagagccgtgttagatagtctatcagaaaagaagaaaagcagtccg

SEQ ID NO: 207 - DNA, 1050 bp, artificial sequence
  MHP77(L15-23)
atgaacaccaagtacaacaaggagttcctgctctacctggccggcttcgtggacggcgacggctccatcatcgcgcagatcaagccggaacagtgctacaagttcaagcaccggctcatgctgaccttcacagtgacccagaagacgcagcggcgctggttcctcgacaagctggtcgacgagatcggggtgggctacgtccgtgaccgcgggtcggtgtccgactacatcctctcccagatcaagcccctgcacaacttcctcacccagctccagccgttcctcaagctgaagcagaagcaggcgaacctcgccctgaagatcatcgagcagctcccctcggccaaggagtccccggacaagttcctgagggtgtgcacgtgtgtcgaccggatcgcggccctcaacgacagcaagacccgcaagacgacctcggagacggtgcgggcggtcctggactctctcccaggatccgtgggaggtctatcgccatcccaggcatccagcgccgcatcctcggcttcctcaagcccgggttcagggatctccgaagcactcagagctggagcaactaagtccaaagagtttttattatatttagcggggtttgtcgatggggatgggagtataatagccagtatacgccccgaacaatcgcgtaaatttaaacatcgcttagaattacgttttacggtcacgcaaaaaacccaacgtaggtggtttttagataaattagtggatgaaattggcgtcgggtatgtgtatgatcagggcagcgtcagtcattataggttaagtcaaataaaaccgttacataattttttaacgcaattacaaccctttttaaaattaaaacaaaaacaagctaatttagtgttaaaaataatagaacaattaccgagcgcgaaagaaagtcccgataaatttttagaagtctgtacctgggtggatcaaatagccgcgttaaatgattcaaaaacgaggaaaaccacgagcgaaaccgtcagagccgtgttagatagtctatcagaaaagaagaaaagcagtccg

SEQ ID NO: 208 - DNA, 1050 bp, artificial sequence
  MHP77(L15-24)
atgaacaccaagtacaacaaggagttcctgctccacctggccggcttcgtggacggcgacggctccatcattgcgcagatcaagccggaacagcgctacaagttcaagcaccggctcatgctgaccttcacagtgacccagaagacgcggaggcgctggttcctcgacaagctggtcgacgagatcggggtgggctacgtccgtgaccgcgggtcggtgtccgactacatcctctcccagatcaagcccctgcacaacttcctcacccagctccagccgttcctcaagctgaagcagaagcaggcgaacctcgtcctgaagatcatcgagcagctcccctcggccaaggagtccccggacaagttcctggaggtgtgcacgtgggtcgaccagatcgcggccctcaacgacagcaagacccgcaagacgacctcggagacggtgcgggcggtcctggactctctcccaggatccgtggggggtctatcgccatctcaggcatccagcgccgcatcctcggcttcctcaagcccgggttcagggatctccgaagcactcagagctggagcaactaagtccaaagagtttttattatatttagcggggtttgtcgatggggatgggagtataatagccagtatacgccccgaacaatcgcgtaaatttaaacatcgcttagaattacgttttacggtcacgcaaaaaacccaacgtaggtggtttttagataaattagtggatgaaattggcgtcgggtatgtgtatgatcagggcagcgtcagtcattataggttaagtcaaataaaaccgttacataattttttaacgcaattacaaccctttttaaaattaaaacaaaaacaagccaatttagtgttaaaaataatagaacaattaccgagcgcgaaagaaagtcccgataaatttttagaagtctgtacctgggtggatcaaatagccgcgttaaatgattcaaaaacgaggaaaaccacgagcgaaaccgtcagagccgtgttaggtagtttatcagaaaagaagaaaagcagtccg

SEQ ID NO: 209 - DNA, 1050 bp, artificial sequence
  MHP77(L15-28)
atgaacaccaagtacaacaaggagttcctgctccacctggccggcttcgtggacggcgacggctccatcattgcgcagatcaagccggaacagcgctacaagttcaagcaccggctcatgctgaccctcacagtgacccagaagacgcagaggcgctggttcctcgacaagctggtcgacgagatcggggtgggctacgtccgtgaccgcgggtcggtgtccgactacatcctctcccagatcaagcccctgcacaacttcctcacccagctccagccgttcctcaagctgaagcagaagcaggcgaacctcgccctgaagatcatcgagcagctcccctcggccaaggagtccccggacaagttcctggaggtgtgcacgtgggtcgaccagatcgcggccctcaacgacagcaagacccgcaagacgacctcggagacggtgcgggcggtcctggactccctcccaggatccgtgggaggtctatcgccatcccaggcatccagcgccgcatcctcggcttcctcaagcccgggttcagggatctccgaagcactcagagctggagcaactaagtccaaagagtttttattatatttagcggggtttgtcgatggggatgggagtataatagccagtatacgccccgaacaatcgcgtaaatttaaacatcgcttagaattacgttttacggtcacgcaaaaaacccaacgtaggtggtttttagataaattagtggatgaaataggcgtcggggatgtgtatgatcagggcagcgtcagtcattataggttaagtcgaataaaaccgttacataattttttaacgcaattacaaccctttttaaaattaaaacaaaaacaagccaacttagtgttaaaaataatagaacaattaccgagcgcgaaagaaagtcccgataaatttttagaagtctgtacctgggtggatcaaatagccgcgttaaatgattcaaaaacgaggaaaaccacgagcgaaaccgtcagagccgtgttagatagtttatcagaaaagaagaaaagcagtccg

SEQ ID NO: 210 - DNA, 1050 bp, artificial sequence
  MHP77(L15-29)
atgaacaccaagtacaacaaggagttcctgctctacctggccggcttcgtggacggcgacggctccatcattgcgcagatcaagccggaacagcgctacaagttcaagcaccggctcatgctgaccttcacagtgacccagaagacgcagaggcgctggatcctcgacaagctggtcgacgagatcggggtgggctacgtccgtgaccgcgggtcggtgtccgactacatcctctcccagatcaagcccctgcacaacttcctcacccagctccagccgttcctcaagctgaagcagaagcaggcgaacctcgtcctgaagatcatcgagcagctcccctcggccaaggagtccccggacaagttcctgagggtgtgcacgtgggtcgaccagatcgcggccctcaacgacagcaagacccgcaagacgacctcggagacggtgcgggcggtcctggactccctcccaggatccgtgggaggtctatcgccatctcaggcatccagcgccgcatcctcggcttcctcaagcccgggttcagggatctccgaagcactcagagctggagcaactaagtccaaagagtttttattatatttagcggggtttgtcgatggggatgggagtataatggccagtatacgccccgaacaatcgcgtaaatttaaacatcgcttagaattacgttttacggtcacgcaaaaaacccaacgtaggtggtttttagataaattagtggatgaaattggcgtcgggtatgtgtatgatcagggcagcgtcagtcattataggttaagtcgaataaaaccgttacataattttttaacgcaattacaaccctttttaaaattaaaacaaaaacaagccaatttagtgttaaaaataatagaacaattaccgagcgcgaaagaaagtcccgataaatttttagaagtctgtacctgggtggatcaaatagccgcgttaaatgattcaaaaacgaggaaaaccacgagcgaaaccgtcagagccgtgttaggtagtttatcagaaaagaagaaaagcagtccg

SEQ ID NO: 211 - DNA, 1050 bp, artificial sequence
  MHP77(L15-33)
atgaacaccaagtacaacaaggagttcctgctccacctggccggcttcgtggacggcgacggctccatcattgcgcagatcaagccggaacagcgctacaagttcaagcaccggctcatgctgaccttcacagtgacccagaagacgcagaggcgctggttcctcgacaagctggtcgacgagatcggggtgggctacgtccgtgaccgcgggtcggcgtccgactacatcctctcccagatcaagcccctgcacaacttcctcacccagctccagccgttcctcaagctgaagcagaagcaggcgaacctcgccctgaagatcatcgagcagctcccctcggccaaggagtccccggacaagttcctgagggtgtgcacgtgggtcgaccagatcgcggccctcaacgacagcaagacccgcaagacgacctcggagacggtgcgggcggtcctggactctctcccaggatccgtgggaggtctatcgccatctcaggcatccagcgccgcatcctcggcttcctcaagcccgggttcagggatctccgaagcactcagagctggagcaactaagtccaaagagtttttattatatttagcggggtttgtcgatggggatgggagtataatagccagtatacgccccgaacaatcgcgtaaatttaaacatcgcttagaattacgttttacggtcacgcaaaaaacccaacgtaggtggtttttagataaattagtggatgagataggcgtcgggtatgtgtatgatcagggcagcgtcagtcattataggttaagtcaaataaaaccgttacataattttttaacgcaattacaaccctttttaaaattaaaacaaaaacaagccaatttagtgttaaaaataatagaacaattaccgagcgcgaaagaaagtcccgataaatttttagaagtctgtacctgggtggatcaaatagccgcgttaaatgattcaaaaacgaggaaaaccacgagcgaaaccgtcagagccgtgttagatagtttatcagaaaagaagaaaagcagcccg

SEQ ID NO: 212 - DNA, 1050 bp, artificial sequence
  MHP77(L15-34)
atgaacaccaagtacaacaaggagttcctgctccacctggccggcttcgtggacggcgacggctccatcattgcgcagatcaagccggaacagcgctacaagttcaagcaccggctcatgctgaccttcacagtgacccagaagacgcagaggcgctggttcctcgacaagctggtcgacgagatcggggtgggctacgtccgtgaccgcgggtcggcgtccgactacatcctctcccagatcaagcccctgcacaacttcctcacccagctccagccgttcctcaagctgaagcagaagcaggcgaacctcgtcctgaagatcatcgagcagctctcctcggccaaggagtccccggacaagttcctggaggtgtgcacgtgggtcgaccggatcgcggccctcaacgacagcaagacccgcaagacgacctcggagacggtgcgggcggtcctggactccctcccaggatccgtgggaggtctatcgccatcccaggcatccagcgccgcatcctcggcttcctcaagcccgggttcagggatctccgaagcactcagagctggagcaactaagtccaaagagtttttattatatttagcggggtttgtcgatggggatgggagtataatagccagtatacgccccgaacaatcgcgtaaatttaaacatcgcttagaattacgttttacggtcacgcaaaaaacccaacgtaggtggtttttagataaattagtggatgaaataggcgtcgggtatgtgtatgatcagggcagcgtcagtcattataggttaagtcaaataaaaccgttacataatttcttaacgcaattacaaccctttttaaaattaaaacaaaaacaagccaatttagtgttaaaaataatagaacaattaccgagcgcgaaagaaagtcccgataaatttttagaagtctgtacctgggcggatcaaatagccgcgttaaatgattcaaaaacgaggaaaaccacgagcgaaaccgtcagagccgtgttagatagtttatcagaaaagaagaaaagcagtccg

SEQ ID NO: 213 - DNA, 1050 bp, artificial sequence
  MHP77(L15-35)
atgaacaccaagtacaacaaggagttcctgctctacctggccggcttcgtggacggcgacggctccatcattgcgcagatcaagccggaacagcgctacaagttcaagcaccggctcatgctgaccttcacagtgacccagaagacgcggaggcgctggttcctcgacaagctggccgacgagatcggggtgggctacgtccgtgaccgcgggtcggtgtccgactacatcctctcccagatcaagcccctgcacgacttcctcacccagctccagccgttcctcaagctgaagcagaagcaggcgaacctcgtcctgaagatcatcgagcagctcccctcggccaaggagtccccggacaagttcctgagggtgtgcacgtgggtcgaccagatcgcggccctcaacgacagcaagacccgcaagacgacctcggagacggtgcgggcggtcctggactccctcccagggtccgtgggaggtctatcgccatcccaggcatccagcgccgcatcctcggcttcctcaagcccgggttcagggatctccgaagcactcagagctggagcaactaagtccaaagagtttttattatatttagcggggtttgtcgatggggatgggagtataatagccagtatacgccccgaacaatcgcgtaaatttaaacatcgcttagaattacgttttacggtcacgcaaaaaacccaacgtaggtggtttttagataaattagtggatgaaataggcgtcgggtatgtgtatgatcagggcagcgtcagtcattataggttaagtcaaataaaaccgttacataattttttaacgcaattacaaccctttttaaaattaaaacaaaaacaagccaatttagtgttaaaaataatagaacaattaccgagcgcgaaagaaagtcccgataaatttttagaagtctgtacctgggtggatcaaatagccgcgttaaatgattcaaaaacgaggaaaaccacgagcgaaaccgtcagagccgtgttagatagtttatcagaaaagaagaaaagcagcccg

SEQ ID NO: 214 - DNA, 1050 bp, artificial sequence
  MHP77(L15-36)
atgaacaccaagtacaacaaggagttcctgctccacctggccggcttcgtggacggcgacggctccatcatcgcgcagatcaagccggaacagtgctacaagttcaagcaccggctcatgctgaccttcacagtgacccagaagacgcggaggcgctggttcctcgacaagctggtcgacgagatcggggtgggctacgtccgtgaccgcgggtcggtgtccgactacatcctctcccagatcaggcccctgcacaacttcctcacccagctccagccgttcctcaagctgaagcagaagcaggcgaacctcgtcctgaagatcatcgagcagctcccctcggccaaggagtccccggacaagttcctgagggtgtgcacgtgggtcgaccagatcgcggccctcaacgacagcaagacccgcaagacgacctcggagacggtgcgggcggtcctggactccctcccaggatccgtgggaggtctatcgccatctcaggcatccagcgccgcatcctcggcttcctcaagcccgggttcagggatctccgaagcactcagagctggagcaactaagtccaaagagtttttattatatttagcggggtttgtcgatggggatgggagtataatagccagtatacgccccgaacaatcgcgtaaatttaaacatcgcttagaattacgttttacggtcacgcaaaaaacccaacgtaggtggtttttagataaattagtggatgaaataggcgtcgggtatgtgtatgatcagggcagcgtcagtcattataggttaagtcaaataaaaccgttacataattttttaacgcaattacaaccctttttaaaattaaaacaaaaacaagccaatttagtgttaaaaataatagaacaattaccgagcgcgaaagaaagtcccgataaatttttagaagtctgtacctgggcggatcaaatagccgcgttaaatgattcaaaaacgaggaaaaccacgagcgaaaccgtcagagccgtgttaggtagtttatcagaaaagaagaaaagcagtccg

SEQ ID NO: 215 - DNA, 1050 bp, artificial sequence
  MHP77(L15-39)
atggacaccaagtacaacaaggagttcctgctccacctggccggcttcgtggacggcgacggctccatcattgcgcagatcaagccggaacagcgctacaagttcaagcaccggctcatgctgaccttcacagtgacccagaagacgcggaggcgctggttcctcgacaagctggtcgacgagatcggggtgggctacgtccgtgaccgcgggtcggtgtccgactacatcctctcccagatcaagcccctgcacaacttcctcacccagctccagccgttcctcaagctgaagcagaagcaggcgaacctcgccctgaagatcatcgagcagctcccctcggccaaggagtccccggacaagttcctggaggtgtgcacgtgggtcgaccggatcgcggccctcaacgacagcaagacccgcaagacgacctcggagacggtgcgggcggtcctggactctctcccaggatccgtgggaggtctatcgccatctcaggcatccagcgccgcatcctcggcttcctcaagcccgggttcagggatctccgaagcactcagagctggagcaactaagtccaaagagtttttattatatttagcggggtttgtcgatggggatgggagtataatggccagtatacgccccgaacaatcgcgtaaatttaaacatcgcttagaattacgttttacggtcacgcaaaaaacccaacgtaggtggtttttagataaattagtggatgaaataggcgtcgggtatgtgtatgatcagggcagcgtcagtcattataggttaagtcgaataaaaccgttacataattttttaacgcaattacaaccctttttaaaattaaaacaaaaacaagccaatttagtgttaaaaataatagaacaattaccgagcgcgaaagaaagtcccgataaatttttagaagtctgtacctgggtggatcaaatagccgcgttaaatgattcaaaaacgaggaaaaccacgagcgaaaccgtcagagccgtgttagatagtctatcagaaaagaagaaaagcagtccg

SEQ ID NO: 216 - DNA, 1050 bp, artificial sequence
  MHP77(L15-40)
atgaacaccaagtacaacaaggagttcctgctctacctggccggcttcgtggacggcgacggctccatcattgcgcagatcaagccggaacagcgctacaagttcaagcaccggctcatgctgaccttcacagtgacccagaagacgcagaggcgctggatcctcgacaagctggtcgacgagatcggggtgggctacgtccgtgaccgcgggtcggcgtccgactacatcctctcccagatcaagcccctgcacaacttcctcacccagctccagccgttcctcaagctgaagcagaagcaggcgaacctcgtcctgaagatcatcgagcagctcccctcggccaaggagtccccggacaagttcctgagggtgtgcacgtgggtcgaccagatcgcggccctcaacgacagcaagacccgcaagacgacctcggagacggtgcgggcggtcctggactccctcccaggatccgtgggaggtctatcgccatcccaggcatccagcgccgcatcctcggcttcctcaagcccgggttcagggatctccgaagcactcagagctggagcaactaagtccaaagagtttttattatatttagcggggtttgtcgatggggatgggagtataatagccagtatacgccccgaacaatcgcgtaaatttaaacatcgcttagaattacgttttacggtcacgcaaaaaacccaacgtaggtggtttttagataaattagtggatgaaataggcgtcgggtatgtgtatgatcagggcagcgtcagtcattataggttaagtcgaataaaaccgttacataattttttaacgcaattacaaccctttttaaaattaaaacaaaaacaagccaatttagtgttaaaaataatagaacaattaccgagcgcgaaagaaagtcccgataaatttttagaagtctgtacctgggtggatcaaatagccgcgttaaatgattcaaaaacgaggaaaaccacgagcgaaaccgtcagagccgtgttagatagtttatcagaaaagaagaaaagcagtccg

SEQ ID NO: 217 - DNA, 1050 bp, artificial sequence
  MHP77(L15-41)
atgaacaccaagtacaacaaggagttcctgctctacctggccggcttcgtggacggcgacggctccatcattgcgcagatcaagccggaacagtgctacaagttcaagcaccggctcatgctgaccttcacagtgacccagaagacgcagaggcgctggatcctcgacaagctggtcgacgagatcggggtgggctacgtccgtgaccgcgggtcggtgtccgactacatcctctcccagatcaagcccctgcacaacttcctcacccagctccagccgttcctcaagctgaagcagaagcaggcgaacctcgtcctgaagatcatcgagcagctcccctcggccaaggagtccccggacaagttcctggaggtgtgcacgtgggtcgaccagatcgcggccctcaacgacagcaagacccgcaagacgacctcggagacggtgcgggcggtcctggactccctcccaggatccgtgggaggtctatcgccatctcaggcatccagcgccgcatcctcggcttcctcaagcccgggttcagggatctccgaagcactcagagctggagcaactaagtccaaagagtttttattatatttagcggggtttgtcgatggggatgggagtataatggccagtatacgccccgaacagtcgcgtaaatttaaacatcgcttagaattacgttttacggtcacgcaaaaaacccaacgtaggtggtttttagataaattagtggatgaaataggcgtcgggtatgtgtatgatcagggcagcgtcagtcattataggttaagtcaaataaaaccgttacataattttttaacgcaattacaaccctttttaaaattaaaacaaaaacaagccaatttagtgttaaaaataatagaacaattaccgagcgcgaaagagagtcccgataaatttttagaagtctgtacctgggtggatcaaatagccgcgttaaatgattcaaaaacgaggaaaaccacgagcgaaaccgtcagagccgtgttagatagtttatcagaaaagaagaaaagcagtccg

SEQ ID NO: 218 - DNA, 1050 bp, artificial sequence
  MHP77(L15-42)
atgaacaccaagtacaacaaggagttcctgctctacctggccggcttcgtggacggcgacggctccatcattgcgcagatcaagccggaacagcgctacaagttcaagcaccggctcatgctgaccttcacagtgacccagaagacgcagaggcgctggttcctcgacaagctggtcgacgagatcggggtgggctacgtccgtgaccgcgggtcggtgtccgactacatcctctcccagatcaagcccctgcacaacttcctcacccagctccagccgttcctcaagctgaagcagaagcaggcgaacctcgtcctgaagatcatcgagcagctcccctcggccaaggagtccccggacaagttcctgagggtgtgcacgtgggtcgaccagatcgcggccctcaacgacagcaagacccgcaagacgacctcggagacggtgcgggcggtcctggactccctcccaggatccgtgggaggtctatcgccatctcaggcatccagcgccgcatcctcggcttcctcaagcccgggttcaggggtctccgaagcactcagagctggagcaactaagtccaaagagtttttattatatttagcggggtttgtcgatggggatgggagtataatggccagtatacgccccgaacaatcgcgtaaatttaaacatcgcttagaattacgttttacggtcacgcaaaaaacccaacgtaggtggtttttagataaattagtggatgaaataggcgtcgggtatgtgtatgatcagggcagcgtcagtcattataggttaagtcaaataaaaccgttacataatttcttaacgcaattacaaccctttttaaaattaaaacaaaaacaagccaatttagtgttaaaaataatagaacaattaccgagcgcgaaagaaagtcccgataaatttttagaagtctgtacctgggtggatcaaatagccgcgttaaatgattcaaaaacgaggaaaaccacgagcgaaaccgtcagagccgtgtttgatagtttatcagaaaagaagaaaagcagtccg

SEQ ID NO: 219 - DNA, 1050 bp, artificial sequence
  MHP77(L15-43)
atgaacaccaagtacaacaaggagttcctgctctacctggccggcttcgtggacggcgacggctccatcattgcgcagatcaagccggaacagtgctacaagttcaagcaccggctcatgctgaccttcacagtgacccagaagacgcagcggcgctggttcctcgacaagctggtcgacgagatcggggtgggctacgtccgtgaccgcgggtcggtgtccgactacatcctctcccagatcaagcccctgcacaacttcctcacccagctccagccgttcctcaagctgaagcagaagcaggcgaacctcgtcctgaagatcatcgagcagctctcctcggccaaggagtccccggacaagttcctggaggtgtgcacgtgggtcgaccggatcgcggccctcaacgacagcaagacccgcaagacgacctcggagacggtgcgggcggtcctggactccctcccagggtccgtgggaggtctatcgccatcccaggcatccagcgccgcatcctcggcttcctcaagcccgggttcagggatctccgaagcactcagagctggagcaactaagtccaaagagtttttattatatttagcggggtttgtcgatggggatgggagtataatagccagtatacgccccgaacaatcgcgtaaatttaaacatcgcttagaattacgttttacggtcacgcaaaaaacccaacgtaggtggtttttagataaattagtggatgaaataggcgtcgggtatgtgtatgatcagggcagcgtcagtcattataggttaagtcaaataaaaccgttacataattttttaacgcaattacaaccctttttaaaattaaaacaaaaacaagccaatttagtgttaaaaataatagaacaattaccgagcgcgaaagaaagtcccgataaatttttagaagtctgtacctgggcggatcaaatagccgcgttaaatgattcaaaaacgaggaaaaccacgagcgaaaccgtcagagccgtgttagatagtctatcagaaaagaagaaaagcagtccg

SEQ ID NO: 220 - DNA, 1050 bp, artificial sequence
  MHP77(L15-45)
atgaacaccaagtacaacaaggagttcctgctctacctggccggcttcgtggacggcgacggctccatcattgcgcagatcaagccggaacagcgctacaagttcaagcaccggctcatgctgaccttcacagtgacccagaagacgcggaggcgctggttcctcgacaagctggtcgacgagatcggggtgggctacgtccgtgaccgcgggtcggtgtccgactacatcctctcccagatcaagcccctgcacaacttcctcacccagctccagccgttcctcaagctgaagcagaagcaggcgaacctcgccctgaagatcatcgagcagctcccctcggccaaggagtccccggacaagttcctgagggtgtgcacgtgggtcgaccggatcgcggccctcaacgacagcaagacccgcaagacgacctcggagacggtgcgggcggtcctggactccctcccagggtccgtgggaggtctatcgccatctcaggcgtccagcgccgcatcctcggcttcctcaagcccgggttcagggatctccgaagcactcagagctggagcaactaagtccaaagagtttttattatatttagcggggtttgtcgatggggatgggagtataatagccagtatacgccccgaacaatcgcgtaaatttaaacatcgcttagaattacgttttacggtcacgcaaaaaacccaacgtaggtggtttttagataaattagtggatgaaataggcgtcgggtatgtgtatgatcagggcagcgtcagtcattataggttaagtcaaataaaaccgttacataattttttaacgcaattacaaccctttttaaaattaaaacaaaaacaagccaatttagtgttaaaaataatagaacaattaccgagcgcgaaagaaagtcccgataaatttttagaagtctgtacctgggcggatcaaatagccgcgttaaatgattcaaaaacgaggaaaaccacgagcgaaaccgtcagagccgtgttagatagtctatcagaaaagaagaaaagcagtccg

SEQ ID NO: 221 - DNA, 1050 bp, artificial sequence
  MHP77(L15-46)
atgaacaccaagtacaacaaggagttcctgctccacctggccggcttcgtggacggcgacggctccatcatcgcgcagatcaagccggaacagcgctacaagttcaagcaccggctcatgctgaccttcacagtgacccagaagacgcggaggcgctggttcctcgacaagctggtcgacgagatcggggtgggctacgtccgtgaccgcgggtcggtgtccgactacatcctctcccagatcaagcccctgcacgacttcctcacccagctccagccgttcctcaagctgaagcagaagcaggcgaacctcgtcctgaagatcatcgagcagctcccctcggccaaggagtccccggacaagttcctgagggtgtgcacgtgggtcgaccagatcgcggccctcaacgacagcaagacccgcaagacgacctcggagacggtgcgggcggtcctggactccctcccaggatccgtgggaggtctatcgccatctcaggcatccagcgccgcatcctcggcttcctcaagcccgggttcaggggtctccgaagcactcagagctggagcaactaagtccaaagagtttttattatatttagcggggtttgtcgatggggatgggagtataatagccagtatacgccccgaacaatcgcgtaaatttaaacatcgcttagaattacgttttacggtcacgcaaaaaacccaacgtaggtggtttttagataaattagtggatgaaataggcgtcgggtatgtgtatgatcagggcagcgtcagtcattataggttaagtcaaataaaaccgttacataattttttaacgcaattacaaccctttttaaaattaaaacaaaaacaagccaacttagtgttaaaaataatagaacaattaccgagcgcgaaagaaagtcccgataaatttttagaagtctgtacctgggtggatcaaatagccgcgttaaatgattcaaaaacgaggaaaaccacgagcgaaaccgtcagagccgtgtttgatagtttatcagaaaagaagaaaagcagcccg

SEQ ID NO: 222 - DNA, 1050 bp, artificial sequence
  MHP77(L15-27)
atgaacaccaagtacaacaaggagttcctgctccacctggccggcttcgtggacggcgacggctccatcattgcgcagatcaagccggaacagcgctacaagttcaagcaccggctcatgctgaccttcacagtgacccagaagacgcagaggcgctggttcctcgacaagctggtcgacgagatcggggtgggctacgtccgtgaccgcgggtcggcgtccgactacatcctctcccagatcaagcccctgcacaacttcctcacccagctccagccgttcctcaagctgaagcagaagcaggcgaacctcgccctgaagatcatcgagcagctcccctcggccaaggagtccccggacaagttcctggaggtgtgcacgtgggtcgaccggatcgcggccctcaacgacagcaagacccgcaagacgacctcggagacggtgcgggcggtcctggactccctcccagggtccgtgggaggtctatcgccatctcaggcatccagcgccgcatcctcggcttcctcaagcccgggttcagggatctccgaagcactcagagctggagcaactaagtccaaagagtttttattatatttagcggggtttgtcgatggggatgggagtataatggccagtatacgccccgaacaatcgcgtaaatttaaacatcgcttagaattacgttttacggtcacgcaaaaaacccaacgtaggtggtttttagataaattagtggatgagataggcgtcgggtatgtgtatgatcagggcagcgtcagtcattataggttaagtcaaataaaaccgttacataattttttaacgcaattacaaccctttttaaaattaaaacaaaaacaagccaatttagtgttaaaaataatagaacaattaccgagcgcgaaagagagtcccgataaatttttagaagtctgtacctgggtggatcaaatagccgcgttaaatgattcaaaaacgaggaaaaccacgagcgaaaccgtcagagccgtgttagatagtttatcagaaaagaagaaaagcagtccg

SEQ ID NO: 223 - DNA, 1050 bp, artificial sequence
  MHP77(L15-30)
atgaacaccaagtacaacaaggagttcctgctctacctggccggcttcgtggacggcgacggctccatcattgcgcagatcaggccggaacagtgctacaagttcaagcaccggctcatgctgaccctcacagtgacccagaagacgcagaggcgctggttcctcgacaagctggccgacgagatcggggtgggctacgtccgtgaccgcgggtcggcgtccgactacatcctctcccagatcaagcccctgcacaacttcctcacccagctccagccgttcctcaagctgaagcagaagcaggcgaacctcgtcctgaagatcatcgagcagctcccctcggccaaggagtccccggacaagttcctggaggtgtgcacgtgggtcgaccagatcgcggccctcaacgacagcaagacccgcaagacgacctcggagacggtgcgggcggtcctggactctctcccagggtccgtgggaggtctatcgccatctcaggcatccagcgccgcatcctcggcttcctcaagcccgggttcaggggtctccgaagcactcagagctggagcaactaagtccaaagagtttttattatatttagcggggtttgtcgatggggatgggagtataatagccagtatacgccccgaacaatcgcgtaaatttaaacatcgcttagaattacgttttacggtcacgcaaaaaacccaacgtaggtggtttttagataaattagtggatgaaataggcgtcgggtatgtgtatgatcagggcagcgtcagtcattataggttaagtcgaataaaaccgttacataattttttaacgcaattacaaccctttttaaaattaaaacaaaaacaagccaatttagtgttaaaaataatagaacaattaccgagcgcgaaagagagtcccgataaatttttagaagtctgtacctgggtggatcaaatagccgcgttaaatgattcaaaaacgaggaaaaccacgagcgaaaccgtcagagccgtgttagatagtttatcagaaaagaagaaaagcagtccg

SEQ ID NO: 224 - DNA, 1050 bp, artificial sequence
  MHP77(L15-31)
atgaacaccaagtacaacaaggagttcctgctctacctggccggcttcgtggacggcgacggctccatcattgcgcagatcaagccggaacagcgctacaagttcaagcaccggctcatgctgaccttcacagtgacccagaagacgcagaggcgctggatcctcgacaagctggtcgacgagatcggggtgggctacgtccgtgaccgcgggtcggcgtccgactacatcctctcccagatcaagcccctgcacaacttcctcacccagctccagccgttcctcaagctgaagcagaagcaggcgaacctcgtcctgaagatcatcgagcagctcccctcggccaaggagtccccggacaagttcctggaggtgtgcacgtgggtcgaccagatcgcggccctcaacgacagcaagactcgcaagacgacctcggagacggtgcgggcggtcctggactctctcccaggatccgtggggggtctatcgccatctcaggcatccagcgccgcatcctcggcttcctcaagcccgggttcaggggtctccgaagcactcagagctggagcaactaagtccaaagagtttttattatatttagcggggtttgtcgatggggatgggagtataatagccagtatacgccccgaacagtcgcgtaaatttaaacatcgcttagaattacgttttacggtcacgcaaaaaacccaacgtaggtggtttttagataaattagtggatgaaataggcgtcgggtatgtgtatgatcagggcagcgtcagtcattataggttaagtcaaataaaaccgttacataatttcttaacgcaattacaaccctttttaaaattaaaacaaaaacaagccaatttagtgttaaaaataatagaacaattaccgagcgcgaaagaaagtcccgataaatttttagaagtctgtacctgggtggatcaaatagccgcgttaaatgattcaaaaacgaggaaaaccacgagcgaaaccgtcagagccgtgttagatagtctatcagaaaagaagaaaagcagtccg

SEQ ID NO: 225 - DNA, 1050 bp, artificial sequence
  MHP77(L15-47)
atgaacaccaagtacaacaaggagttcctgctccacctggccggcttcgtggacggcgacggctccatcattgcgcagatcaggccggaacagtgctacaagttcaagcaccggctcatgctgaccttcacagtgacccagaagacgcagaggcgctggttcctcgacaagctggtcgacgagatcggggtgggctacgtccgtgaccgcgggtcggtgtccgactacatcctctcccagatcaagcccctgcacaacttcctcacccagctccagccgttcctcaagctgaagcagaagcaggcgaacctcgtcctgaagatcatcgagcagctcccctcggccaaggagtccccggaaaagttcctggaggtgtgcacgtgggtcgaccagatcgcggccctcaacgacagcaagacccgcaagacgacctcggagacggtgcgggcggtcctggactccctcccaggatccgtggggggtctatcgccatctcaggcatccagcgccgcatcctcggcttcctcaagcccgggttcagggatctccgaagcactcagagctggagcaactaagtccaaagagtttttattatatttagcggggtttgtcgatggggatgggagtataatagccagtatacgccccgaacaatcgcgtaaatttaaacatcgcttagaattacgttttacggtcacgcaaaaaacccaacgtaggtggtttttagataaattagtggatgaaataggcgtcgggtatgtgtatgatcagggcagcgtcagtcattataggttaagtcaaataaaaccgttacataatttcttaacgcaattacaaccctttttaaaattaaaacaaaaacaagccaatttagtgttaaaaataatagaacaattaccgagcgcgaaagaaagtcccgataaatttttagaagtctgtacctgggcggatcaaatagccgcgttaaatgattcaaaaacgaggaaaaccacgagcgaaaccgtcagagccgtgttagatagtctatcagaaaagaagaaaagcagtccg

SEQ ID NO: 226 - DNA, 1050 bp, artificial sequence
  MHP77(L16-01)
atgaacaccaagtacaacaaggagttcctgctctacctggccggcttcgtggacggcgacggctccatcattgcgcagatcaagccggaacagcgctacaagttcaagcaccggctcatgctgaccttcacagtgacccagaagacgcagcggcgctggatcctcttgaagctggtcgacgagatcggggtgggctacgtccgtgaccgcgggtcggtgtccgattacatcctctcccagatcaagcccctgcacaacttcctcacccagctccagccgttcctcaagctgaagcagaagcaggcgaacctcgtcctgaagatcatcgagcagctcccctcggccaaggagtccccggacaagttcctggaggtgtgcacgtgggtcgaccagatcgcggccctcaacgacagcaagacccgcaagacgacctcggagacggtgcgggcggtcctgctgtccctcccaggatccgtgggaggtctatcgccatctcaggcatccagcgccgcatcctcggcttcctcaagcccgggttcagggatctccgaagcactcagagctggagcaactaagtccaaagagtttttattatatttagcggggtttgtcgatggggatgggagtataatggccagtatacgccccgaacaatcgcgtaaatttaaacatcgcttagaattacgttttacggtcacgcaaaaaacccaacgtaggtggtttttagataaattagtggatgagataggcgtcgggtatgtgtatgatcagggcagcgtcagtcattataggttaagtcaaataaaaccgttacataattttttaacgcaattacaaccctttttaaaattaaaacaaaaacaagccaatttagtgttaaaaataatagaacaattaccgagcgcgaaagaaagtcccgataaatttttagaagtctgtacctgggcggatcaaatagccgcgttaaatgattcaaaaacgaggaaaaccacgagcgaaaccgtcagagccgtgttagatagtctatcagaaaagaagaaaagcagtccg

SEQ ID NO: 227 - DNA, 1050 bp, artificial sequence
  MHP77(L16-02)
atgaacaccaagtacaacaaggagttcctgctctacctggccggcttcgtggacggcgacggctctatcattgcgcagatcaggccggaacagtgctacaagttcaagcaccggctcatgctgaccttcacagtgacccagaagacgcagaggcgctggatcctcgacaagctggtcgacgagatcggggtgggctacgtccgtgaccgcgggtcggtgtccgactacatcctctcccagatcaagcccctgcacaacttcctcacccagctccagccgttcctcaagctgaagcagaagcaggcgaacctcgtcctgaagatcatcgagcagctcccctcggccaaggagtccccggacaagttcctggaggtgtgcacgtgggtcgaccagatcgcggccctcaacgacagcaagacccgcaagacgacctcggagacggtgcgggcggtcctggactccctcccaggatccgtggggggtctatcgccatctcaggcatccagcgccgcatcctcggcttcctcaagcccgggttcagggatctccgaagcactcagagctggagcaactaagtccaaagagtttttattatatttagcggggtttgtcgatggggatgggagtataatggccagtatacgccccgaacaatcgcgtaaatttaaacatcgcttagaattacgttttacggtcacgcaaaaaacccaacgtaggtggtttttagataaattagtggatgaaataggcgtcgggtatgtgtatgatcagggcagcgtcagtcattataggttaagtcaaataaaaccgttacataatttcttaacgcaattacaaccctttttaaaattaaaacaaaaacaagccaatttagtgttaaaaataatagaacaattaccgagcgcgaaagaaagtcccgataaatttttagaagtctgtacctgggcggatcaaatagccgcgttaaatgattcaaaaacgaggaaaaccacgagcgaaaccgtcagagccgtgttagatagtttatcagaaaagaagaaaagcagtccg

SEQ ID NO: 228 - DNA, 1050 bp, artificial sequence
  MHP77(L16-03)
atgaacaccaagtacaacaaggagttcctgctctacctggccggcttcgtggacagcgacggctctatcattgcgcagatcaagccggaacagcgctacaagttcaagcaccggctcatgctgaccttcacagtgacccagaagacgcagaggcgctggttcctcgacaagctggtagacgagatcggggtgggctacgttcgtgaccgcgggtcggtgtccgactacatcctctcccagataaagcccctgcacaacttcctcacccagctccagccgttcctcaagctgaagcagaagcaggcgaacctcgtcctgaagatcatcgagcagctcccctcggccaaggagtccccggacaagttcctggaggtgtgcacgtgggtcgaccagatcgcggccctcaacgacagcaagacccgcaagacgacctcggagacggtgcgggcggtcctgctgtccctcccaggatccgtgggaggtctatcgccatctcaggcatccagcgccgcatcctcggcttcctcaagcccgggttcagggatctccgaagcactcagagctggagcaactaagtccaaagagtttttattatatttagcggggtttgtcgatggggatgggagtataatggccagtatacgccccgaacaatcgcgtaaatttaaacatcgcttagaattacgttttacggtcacgcaaaaaacccaacgtaggtggtttttagatgaattagtggatgaaataggcgtcgggtatgtgtatgatcagggcagcgtcagtcattataggttaagtcaaataaaaccgttacataattttttaacgcaattacaaccctacttaaaattaaaacaaaaacaagccaatttagtgttaaaaataatagaacaattaccgagcgcgaaagaaagtcccgataaatttttagaagtctgtacctgggcggatcaaatagccgcgttaaatgattcaaaaacgaggaaaaccacgagcgaaaccgtcagagccgtgttagatagtttatcagaaaagaagaaaagcagtccg

SEQ ID NO: 229 - DNA, 1050 bp, artificial sequence
  MHP77(L16-04)
atgaacaccaagtacaacaaggagttcctgctctacctggccggcttcgtggacggcgacggctctatcattgcgcagatcaggccggaacagcgctacaagttcaagcaccggctcatgctgaccttcacagtgacccagaagacgcggaggcgctggatcctcgacaagctggtcgacgagatcggggtgggctacgtccgtgaccgcgggtcggtgtccgactacatcctctcccagatcaagcccctgcacaacttcctcacccagctccagccgttcctcaagctgaagcagaagcaggcgaacctcgtcctgaagatcatcgagcagctcccctcggccaaggagtccccggacaaattcctggaggtgtgcacgtgggtcgaccagatcgcggccctcaacgacagcaagacccgcaagacgacctcggagacggtgcgggcggtcctggactccctcccaggatccgtgggaggtctatcgccatctcaggcatccagcgccgcatcctcggcttcctcaagcccgggttcaggggtctccgaagcactcagagctggagcaactaagtccaaagagtttttattatatttagcggggtttgtcgatggggatgggagtataatagccagtatacgccccgaacaatcgcgtaaatttaaacatcgcttagaattacgttttacggtcacgcaaaaaacccaacgtaggtggtttttagataaattagtggatgaaataggcgtcgggtatgtgtatgatcagggcagcgtcagtcattataggttaagtcaaataaaaccgttacataatttcttaacgcaattacaaccctttttaaaattaaaacaaaaacaagccaatttagtgttaaaaataatagaacaattaccgagcgcgaaagaaagtcccgataaatttttagaagtctgtacctgggtggatcaaatagccgcgttaaatgattcaaaaacgaggaaaaccacgagcgaaaccgtcagagccgtgttagatagtttatcagaaaagaagaaaagcagtccg

SEQ ID NO: 230 - DNA, 1050 bp, artificial sequence
  MHP77(L16-05)
atgaacaccaagtacaacaaggagttcctgctctacctggccggcttcgtagacggcgacggctctatcattgcgcagatcaagccggaacagcgctacaagttcaagcaccggctcatgctgaccttcacagttacccagaagacgagaaggcgctggatcctcgataagctggtagacgagatcggggtgggctacgtccgtgaccgcgggtcggcgtccgactacatcctctcccagaaaaagcccctgcacaacttcctcacccagctccagccgttcctcaagctgaagcagaagcaggcgaacctcgtcctgaagatcatcgagcagctcccctcggccaaggagtccccggacaagttcctggaggtgtgcacgtgggtcgaccagatcgcggccctcaacgacagcaagacccgcaagacgacctcggagacggtgcgggcggtcctgctgtccctcccaggatccgtgggaggtctatcgccatctcaggcatccagcgccgcatcctcggcttcctcaagcccgggttcagggatctccgaagcactcagagctggagcaactaagtccaaagagtttttattatatttagcggggtttgtcgatggggacgggagcataatagccagtatacgccccgaacagtcgcgtaaatttaaacatcgcttagaattacgttttacggtcacgcaaaaaacccaacgtaggtggtttttagataaattagtggatgaaataggcgtcgggtatgtgtatgatcagggcagcgtcagtcattataggttaagtcaaataaaaccgttacataattttttaacgcaattacaaccctttttaaaattaaaacaaaaacaagccaacttagtgttaaaaataatagaacaattaccgagcgcgaaagaaagtcccgataaatttttagaagtctgtacctgggtggatcaaatagccgcgttaaatgattcaaaaacgaggaaaaccacgagcgaaaccgtcagagccgtgttagatagtttatcagaaaagaagaaaagcagtccg

SEQ ID NO: 231 - DNA, 1050 bp, artificial sequence
  MHP77(L16-06)
atgaacaccaagtacaacaaggagttcctgctctacctggccggcttcgtggacggcgacggctctatcattgcgcagatcaagccggaacagtgctacaagttcaagcaccggctcatgctgaccttcacagtgacccagaagacgagaaggcgctggatcctcgataagctggtagacgagatcggggtgggctacgtccgtgaccgcggaaccgcatccgactacatcctctcccagatcaagcccctgcacaacttcctcacccagctccagccgttcctcaagctgaagcagaagcaggcgaacctcgtcctgaagatcatcgagcagctcccctcggccaaggagtccccggacaagttcctggaggtgtgcacgtgggccgaccagatcgcggccctcaacgacagcaagacccgcaagacgacctcggagacggtgcgggcggtcctgctgtccctcccaggatccgtgggaggtctatcgccatctcaggcgtccagcgccgcatcctcggcttcctcaagcccgggttcagggatctccgaagcactcagagctggagcaactaagtccaaagagtttttattatatttagcggggtttgtcgatggggatgggagtataatagccagtatacgccccgaacaatcgcgtaaatttaaacatcgcttagaattacgttttacggtcacgcaaaaaacccaacgtaggtggtttttagataaattagtggatgaaataggcgtcgggtatgtgtatgatcagggcagcgtcagtcattataggttaagtcaaataaaaccgttacataattttttaacgcaattacaaccctttttaaaattaaaacaaaaacaagccaatttagtgttaaaaataatagaacaattaccgagcgcgaaagaaagtcccgataaatttttagaagtctgtacctgggtggatcaaatagccgcgttaaatgattcaaaaacgaggaaaaccacgagcgaaaccgtcagagccgtgttagatagtttatcagaaaagaagaaaagcagtccg

SEQ ID NO: 232 - DNA, 1050 bp, artificial sequence
  MHP77(L16-07)
atggacaccaagtacaacaaggagttcctgctctacctggccggcttcgtggacggcgacggctccatcattgcgcagatcaagccggaacagcgctacaagttcaagcaccggctcatgctgaccttcacagtgacccagaagacgcagaggcgctggttcctcgacaagctggtcgacgagatcggggtgggctacgtccgtgaccgcgggtcggtgtccgactacatcctctcccagatcaagcccctgcacaacttcctcacccagctccagccgttcctcaagctgaagcagaagcaggcgaacctcgtcctgaagatcatcgagcagctcccctcggccaaggagtccccggacaagttcctggaggtgtgcacgtgggtcgaccggatcgcggccctcaacgacagcaagacccgcaagacgacctcggagacggtgcgggcggtcctggactccctcccaggatccgtgggaggtctatcgccatctcaggcatccagcgccgcatcctcggcttcctcaagcccgggttcagggatctccgaagcactcagagctggagcaactaagtccaaagagtttttattatatttagcggggtttgtcgatggggatgggagtataatggccagtatacgccccgaacaatcgcgtaaatttaaacatcgcttagaattacgttttacggtcacgcaaaaaacccaacgtaggtggtttttagataaattagtggatgaaataggcgtcgggtatgtgtatgatcagggcagcgtcagtcattataggttaagtcaaataaaaccgttacataattttttaacgcaattacaaccctttttaaaattaaaacaaaaacaagccaatttagtgttaaaaataatagaacaattaccgagcgcgaaagaaagtcccgataaatttttagaagtctgtacctgggtggatcaaatagccgcgttaaatgattcaaaaacgaggaaaaccacgagcgaaaccgtcagagccgtgttagatagtttatcagaaaagaagaaaagcagtccg

SEQ ID NO: 233 - DNA, 1050 bp, artificial sequence
  MHP77(L16-08)
atgaacaccaagtacaacaaggagttcctgctccacctggccggcttcgtggacggcgacggctccatcattgcgcagatcaagccggaacagcgctacaagttcaagcaccggctcatgctgaccttcacagtgacccagaagacgcagaggcgctggttcctcgacaagctggtcgacgagatcggggtgggctacgtccgtgaccgcggaaccgcatccgactacatcctctcccagatcaagcccctgcacgacttcctcacccagctccagccgttcctcaagctgaagcagaagcaggcgaacctcgccctgaagatcatcgagcagctcccctcggccaaggagtccccggacaagttcctggaggtgtgcacgtgggtcgaccagatcgcggccctcaacgacagcaagacccgcaagacgacctcggagacggtgcgggcggtcctggactccctcccaggatccgtgggaggtctatcgccatcccaggcatccagcgccgcatcctcggcttcctcaagcccgggttcagggatctccgaagcactcagagctggagcaactaagtccaaagagtttttattatatttagcggggtttgtcgatggggatgggagtataatggccagtatacgccccgaacaatcgcgtaaatttaaacatcgcttagaattacgttttacggtcacgcaaaaaacccaacgtaggtggtttttagataaattagtggatgagataggcgtcgggtatgtgtatgatcagggcagcgtcagtcattataggttaagtcgaataaaaccgttacataattttttaacgcaattacaaccctttttaaaattaaaacaaaaacaagccaacttagtgttaaaaataatagaacaattaccgagcgcgaaagaaagtcccgataaatttttagaagtctgtacctgggtggatcaaatagccgcgttaaatgattcaaaaacgaggaaaaccacgagcgaaaccgtcagagccgtgttagatagtttatcagaaaagaagaaaagcagtccg

SEQ ID NO: 234 - DNA, 1050 bp, artificial sequence
  MHP77(L16-09)
atgaacaccaagtacaacaaggagttcctgctctacctggccggcttcgtggacgctgatggcagcattattgcgcagatcaagccggaacagtgctacaagttcaagcaccggctcatgctgaccttcacagtgacccagaagacgcaaaggcgctggatcctcttgaagctggtagacgagatcggggtgggctacgtccgtgaccgcgggtcggcgtccgactacatcctctcccagatcaagcccctgcacaacttcctcacccagctccagccgttcctcaagctgaagcagaagcaggcgaacctcgtcctgaagatcatcgagcagctcccctcggccaaggagtccccggacaagttcctgagggtgtgcacgtgggtcgaccggatcgcggccctcaacgacagcaagacccgcaagacgacctcggagacggtgcgggcggtcctggactccctcccaggatccgtgggaggtctatcgccatctcaggcatccagcgccgcatcctcggcttcctcaagcccgggttcagggatctccgaagcactcagagctggagcaactaagtccaaagagtttttattatatttagcggggtttgtcgatggggatgggagtataatagccagtatacgccccgaacaatcgcgtaaatttaaacatcgcttagaattacgttttacggtcacgcaaaaaacccaacgtaggtggtttttagataaattagtggatgaaataggcgtcgggtatgtgtatgatcagggcagcgtcagtcattataggttaagtcaaataaaaccgttacataatttcttaacgcaattacaaccctttttaaaattaaaacaaaaacaagccaatttagtgttaaaaataatagaacaattaccgagcgcgaaagaaagtcccgataaatttttagaagtctgtacctgggcggatcaaatagccgcgttaaatgattcaaaaacgaggaaaaccacgagcgaaaccgtcagagccgtgttagatagtctatcagaaaagaagaaaagcagtccg

SEQ ID NO: 235 - DNA, 1050 bp, artificial sequence
  MHP77(L16-11)
atgaacaccaagtacaacaaggagttcctgctctacctggccggcttcgtggacggcgacggctccatcattgcgcagatcaggccggaacagcgctacaagttcaagcaccggctcatgctgaccttcacagtgacccagaagacgcagaggcgctggatcctcgacaagctggtcgacgagatcggggtgggctacgtccgtgaccgcgggtcggcgtccgactacatcctctcccagatcaagcccctgcacaacttcctcacccagctccagccgttcctcaagctgaagcagaagcaggcgaacctcgtcctgaagatcatcgagcagctcccctcggccaaggagtccccggacaagttcctggaggtgtgcacgtgggtcgaccagatcgcggccctcaacgacagcaagacccgcaagacgacctcggagacggtgcgggcggtcctggactccctcccaggatccgtgggaggtctatcgccatctcaggcatccagcgccgcatcctcggcttcctcaagcccgggttcagggatctccgaagcactcagagctggagcaactaagtccaaagagtttttattatatttagcggggtttgtcgatggggatgggagtataatagccagtatacgccccgaacaatcgcgtaaatttaaacatcgcttagaattacgttttacggtcacgcaaaaaacccaacgtaggtggtttttagataaattagtggatgaaataggcgtcgggtatgtatatgatcagggcagcgtcagtcattataggttaagtcgaataaaaccgttacataattttttaacgcaattacaaccctttttaaaattaaaacaaaaacaagccaatttagtgttaaaaataatagaacaattaccgagcgcgaaagaaagtcccgataaatttttagaagtctgtacctgggcggatcaaatagccgcgttaaatgattcaaaaacgaggaaaaccacgagcgaaaccgtcagagccgtgttagatagtttatcagaaaagaagaaaagcagtccg

SEQ ID NO: 236 - DNA, 1050 bp, artificial sequence
  MHP77(L16-12)
atgaacaccaagtacaacaaggagttcctgctctacctggccggcttcgtggacggcgacggctccatcattgcgcagatcaagccggaacagcgctacaagttcaagcaccggctcatgctgaccttcacagtgacccagaagacgcagcggcgctggttcctcgacaagctggtcgacgagatcggggtgggctacgttcgtgaccgcgggtcggcgtccgactacatcctctcccagatcaagcccctgcacaacttcctcacccagctccagccgttcctcaagctgaagcagaagcaggcgaacctcgtcctgaagatcatcgagcagctcccctcggccaaggagtccccggacaagttcctgagggtgtgcacgtgggtcgaccaggttgcggccctcaacgacagcaagacccgcaagacgacctcggagacggtgcgggcggtcctggactccctcccagggtccgtgggaggtctatcgccatctcaggcatccagcgccgcatcctcggcttcctcaagcccgggttcagggatctccgaagcactcagagctggagcaactaagtccaaagagtttttattatatttagcggggtttgtcgatggggacgggagcataatagccagtatacgccccgaacaatcgcgtaaatttaaacatcgcttagaattacgttttacggtcacgcaaaaaacccaacgtaggtggtttttagataaattagtggatgaaataggcgtcgggtatgtgtatgatcagggcagcgtcagtcattataggttaagtcaaataaaaccgttacataattttttaacgcaattacaaccctttttaaaattaaaacaaaaacaagccaatttagtgttaaaaataatagaacaattaccgagcgcgaaagaaagtcccgataaatttttagaagtctgtacctgggcggatcaaatagccgcgttaaatgattcaaaaacgaggaaaaccacgagcgaaaccgtcagagccgtgttagatagtttatcagaaaagaagaaaagcagtccg

SEQ ID NO: 237 - DNA, 1050 bp, artificial sequence
  MHP77(L16-14)
atgaacaccaagtacaacaaggagttcctgctctacctggccggcttcgtggacggcgacggctccatcattgcgcagatcaggccggaacagcgctacaagttcaagcaccggctcatgctgaccttcacagtgacccagaagacgcggaggcgctggttcctcgacaagctggccgacgagatcggggtgggctacgtccgtgaccgcgggtcggtgtccgactacatcctctcccagatcaagcccctgcacaacttcctcacccagctccagccgttcctcaagctgaagcagaagcaggcgaacctcgtcctgaagatcatcgagcagctcccctcggccaaggagtccccggacaagttcctggaggtgtgcacgtgggtcgaccagatcgcggccctcaacgacagcaagacccgcaagacgacctcggagacggtgcgggcggtcctgctgtccctcccaggatccgtgggaggtctatcgccatcccaggcatccagcgccgcatcctcggcttcctcaagcccgggttcagggatctccgaagcactcagagctggagcaactaagtccaaagagtttttattatatttagcggggtttgtcgatggggacgggagcataatagccagtatacgccccgaacaatcgcgtaaatttaaacatcgcttagaattacgttttacggtcacgcaaaaaacccaacgtaggtggtttttagataaattagtggatgaaataggcgtcgggtatgtgtatgatcagggcagcgtcagtcattataggttaagtcaaataaaaccgttacataatttcttaacgcaattacaaccctttttaaaattaaaacaaaaacaagccaatttagtgttaaaaataatagaacaattaccgagcgcgaaagaaagtcccgataaatttttagaagtctgtacctgggcggatcaaatagccgcgttaaatgattcaaaaacgaggaaaaccacgagcgaaaccgtcagagccgtgttagatagtttatcagaaaagaagaaaagcagtccg

SEQ ID NO: 238 - DNA, 1050 bp, artificial sequence
  MHP77(L16-15)
atgaacaccaagtacaacaaggagttcctgctctacctggccggcttcgtggacggcgacggctccatcattgcgcagatcaagccggaacagcgctacaagttcaagcaccggctcatgctgaccttcacagtgacccagaagacgcagaggcgctggatcctcgacaagctggtcgacgagatcggggtgggctacgtccgtgaccgcgggtcggcgtccgactacatcctctcccagaaaaagcccctgcacaacttcctcacccagctccagccgttcctcaagctgaagcagaagcaggcgaacctcgtcctgaagatcatcgagcagctcccctcggccaaggagtccccggacaaattcctggaggtgtgcacgtgggtcgaccagatcgcggccctcaacgacagcaagacccgcaagacgacctcggagacggtgcgggcggtcctggactccctcccaggatccgtgggaggtctatcgccatcccaggcatccagcgccgcatcctcggcttcctcaagcccgggttcaggggtctccgaagcactcagagctggagcaactaagtccaaagagtttttattatatttagcggggtttcttgatgctgatgggagtataatagccagtatacgccccgaacaatcgcgtaaatttaaacatcgcttagaattacgttttacggtcacgcaaaaaacccaacgtaggtggtttttagataaattagtggatgaaataggcgtcgggtatgtgtatgatcagggcagcgtcagtcattataggttaagtcaaataaaaccgttacataattttttaacgcaattacaaccctttttaaaattaaaacaaaaacaagccaatttagtgttaaaaataatagaacaattaccgagcgcgaaagaaagtcccgataaatttttagaagtctgtacctgggtggatcaaatagccgcgttaaatgattcaaaaacgaggaaaaccacgagcgaaaccgtcagagccgtgttagatagtttatcagaaaagaagaaaagcagtccg

SEQ ID NO: 239 - DNA, 1050 bp, artificial sequence
  MHP77(L16-16)
atgaacaccaagtacaacaaggagttcctgctctacctggccggcttcgtggacggcgacggctccatcattgcgcagatcaggccggaacagcgctacaagttcaagcaccggctcatgctgaccttcacagtgacccagaagacgcaaaggcgctggatcctcgacaagatagtcgacgagatcggggtgggctacgtccgtgaccgcgggtcggtgtccgactacatcctctcccagatcaagcccctgcacaacttcctcacccagctccagccgttcctcaagctgaagcagaagcaggcgaacctcgtcctgaagatcatcgagcagctcccctcggccaaggagtccccggacaagttcctgagggtgtgcacgtgggtcgaccagatcgcggccctcaacgacagcaagacccgcaagacgacctcggagacggtgcgggcggtcctggactccctcccaggatccgtgggaggtctatcgccatctcaggcatccagcgccgcatcctcggcttcctcaagcccgggttcagggatctccgaggcactcagagctggagcaactaagtccaaagagtttttattatatttagcggggtttgtcgatggggatgggagtataatagccagtatacgccccgaacaatcgcgtaaatttaaacatcgcttagaattacgttttacggtcacgcaaaaaacccaacgtaggtggtttttagataaattagtggatgaaataggcgtcgggtatgtgtatgatcagggcagcgtcagtcattataggttaagtcaaataaaaccgttacataattttttaacgcaattacaaccctacttaaaattaaaacaaaaacaagccaatttagtgttaaaaataatagaacaattaccgagcgcgaaagaaagtcccgataaatttttagaagtctgtacctgggtggatcaaatagccgcgttaaatgattcaaaaacgaggaaaaccacgagcgaaaccgtcagagccgtgtttgatagtttatcagaaaagaagaaaagcagcccg

SEQ ID NO: 240 - DNA, 1050 bp, artificial sequence
  MHP77(L16-17)
atgaacaccaagtacaacaaggagttcctgctctacctggccggcttcgtggacggcgacggctccatcattgcgcagatcaagccggaacagcgctacaagttcaagcaccggctcatgctgaccttcacagtgacccagaagacgcaaaggcgctggatcctcttgaagctggtagacgagatcggggtgggctacgtccgtgaccgcggaaccgcatccgactacatcctctcccagatcaagcccctgcacaacttcctcacccagctccagccgttcctcaagctgaagcagaagcaggcgaacctcgtcctgaagatcatcgagcagctcccctcggccaaggagtccccggacaagttcctggaggtgtgcacgtgggtcgaccaggttgcggccctcaacgacagcaagacccgcaagacgacctcggagacggtgcgggcggtcctggactccctcccaggatccgtgggaggtctatcgccatctcaggcatccagcgccgcatcctcggcttcctcaagcccgggttcagggatctccgaagcactcagagctggagcaactaagtccaaagagtttttattatatttagcggggtttgtcgatggggatgggagtataatagccagtatacgccccgaacaatcgcgtaaatttaaacatcgcttagaattacgttttacggtcacgcaaaaaacccaacgtaggtggtttttagatgaattagtggatgaaataggcgtcgggtatgtatatgatcagggcagcgtcagtcattataggttaagtcaaataaaaccgttacataattttttaacgcaattacaaccctttttaaaattaaaacaaaaacaagccaatttagtgttaaaaataatagaacaattaccgagcgcgaaagaaagtcccgataaatttttagaagtctgtacctgggcggatcaaatagccgcgttaaatgattcaaaaacgaggaaaaccacgagcgaaaccgtcagagccgtgttagatagtttatcagaaaagaagaaaagcagtccg

SEQ ID NO: 241 - DNA, 1050 bp, artificial sequence
  MHP77(L16-18)
atggacaccaagtacaacaaggagttcctgctctacctggccggcttcgtggacggcgacggctccatcattgcgcagatcaagccggaacagcgctacaagttcaagcaccggctcatgctgaccttcacagttacccagaagacgcggaggcgctggttcctcgacaagctggtagacgagatcggggtgggctacgtccgtgaccgcgggtcggtgtccgactacatcctctcccagatcaagcccctgcacaacttcctcacccagctccagccgttcctcaagctgaagcagaagcaggcgaacctcgtcctgaagatcatcgagcagctcccctcggccaaggagtccccggacaagttcctgagggtgtgcacgtgggtcgaccggatcgcggccctcaacgacagcaagacccgcaagacgacctcggagacggtgcgggcggtcctggactctctcccaggatccgtgggaggtctatcgccatcccaggcatccagcgccgcatcctcggcttcctcaagcccgggttcagggatctccgaagcactcagagctggagcaactaagtccaaagagtttttattatatttagcggggtttgtcgatggggatgggagtataatagccagtatacgccccgaacaatcgcgtaaatttaaacatcgcttagaattacgttttacggtcacgcaaaaaacccaacgtaggtggtttttagataaattagtggatgaaataggcgtcgggtatgtgtatgatcagggcagcgtcagtcattataggttaagtcaaataaaaccgttacataatttcttaacgcaattacaaccctttttaaaattaaaacaaaaacaagccaatttagtgttaaaaataatagaacaattaccgagcgcgaaagaaagtcccgataaatttttagaagtctgtacctgggcggatcaaatagccgcgttaaatgattcaaaaacgaggaaaaccacgagcgaaaccgtcagagccgtgttagatagtctatcagaaaagaagaaaagcagcccg

SEQ ID NO: 242 - DNA, 1050 bp, artificial sequence
  MHP77(L16-19)
atgaacaccaagtacaacaaggagttcctgctctacctggccggcttcgtggacggcgacggctccatcattgcgcagatcaagccggaacagtgctacaagttcaagcaccggctcatgctgaccttcacagtgacccagaagacgagaaggcgctggatcctcgataagctggtagacgagatcggggtgggctacgtccgtgaccgcgggtcggtgtccgactacatcctctcccagaaaaagcccctgcacaacttcctcacccagctccagccgttcctcaagctgaagcagaagcaggcgaacctcgccctgaagatcatcgagcagctccccccggccaaggagtccccggacaagttcctggaggtgtgcacgtgggtcgaccggatcgcggccctcaacgacagcaagacccgcaagacgacctcggagacggtgcgggcggtcctggactccctcccaggatccgtggggggtctatcgccatcccaggcatccagcgccgcatcctcggcttcctcaagcccgggttcagggatctccgaagcactcagagctggagcaactaagtccaaagagtttttattatatttagcggggtttcttgatgctgatgggagtataatagccagtatacgccccgaacaatcgcgtaaatttaaacatcgcttagaattacgttttacggtcacgcaaaaaacccaacgtaggtggtttttagataaattagtggatgaaataggcgtcgggtatgtgtatgatcagggcagcgtcagtcattataggttaagtcaaataaaaccgttacataatttcttaacgcaattacaaccctttttaaaattaaaacaaaaacaagccaatttagtgttaaaaataatagaacaattaccgagcgcgaaagaaagtcccgataaatttttagaagtctgtacctgggcggatcaaatagccgcgttaaatgattcaaaaacgaggaaaaccacgagcgaaaccgtcagagccgtgttagatagtttatcagaaaagaagaaaagcagtccg

SEQ ID NO: 243 - DNA, 1050 bp, artificial sequence
  MHP77(L16-21)
atgaacaccaagtacaacaaggagttcctgctctacctggccggcttcgtggacgctgatggcagcattattgcgcagatcaagccggaacagcgctacaagttcaagcaccggctcatgctgaccttcacagtgacccagaagacgcagaggcgctggttcctcgacaagctggtcgacgagatcggggtgggctacgtccgtgaccgcggaaccgcatccgactacatcctctcccagatcaagcccctgcacaacttcctcacccagctccagccgttcctcaagctgaagcagaagcaggcgaacctcgtcctgaagatcatcgagcagctcccctcggccaaggagtccccggacaaattcctggaggtgtgcacgtgggtcgaccggatcgcggccctcaacgacagcaagacccgcaagacgacctcggagacggtgcgggcggtcctggactccctcccaggatccgtgggaggtctatcgccatctcaggcatccagcgccgcatcctcggcttcctcaagcccgggttcagggatctccgaagcactcagagctggagcaactaagtccaaagagtttttattatatttagcggggtttgtcgatggggatgggagtataatggccagtatacgccccgaacaatcgcgtaaatttaaacatcgcttagaattacgttttacggtcacgcaaaaaacccaacgtaggtggtttttagatgaattagtggatgaaataggcgtcgggtatgtgtatgatcagggcagcgtcagtcattataggttaagtcaaataaaaccgttacataattttttaacgcaattacaaccctacttaaaattaaaacaaaaacaagccaatttagtgttaaaaataatagaacaattaccgagcgcgaaagaaagtcccgataaatttttagaagtctgtacctgggcggatcaaattgccgcgttaaatgattcaaaaacgaggaaaaccacgagcgaaaccgtcagagccgtgtttgatagtttatcagaaaagaagaaaagcagcccg

SEQ ID NO: 244 - DNA, 1050 bp, artificial sequence
  MHP77(L16-23)
atgaacaccaagtacaacaaggagttcctgctctacctggccggcttcgtggacggcgacggctccatcattgcgcagatcaagccggaacagcgctacaagttcaagcaccggctcatgctgaccttcacagtgacccagaagacgcagaggcgctggatcctcgacaagctggtagacgagatcggggtgggctacgtccgtgaccgcgggtcggcgtccgactacatcctctcccagatcaagcccctgcacaacttcctcacccagctccagccgttcctcaagctgaagcagaagcaggcgaacctcgtcctgaagatcatcgagcagctcccctcggccaaggagtccccggacaaattcctggaggtgtgcacgtgggtcgaccagatcgcggccctcaacgacagcaagacccgcaagacgacctcggagacggtgcgggcggtcctgctgtccctcccaggatccgtggggggtctatcgccatctcaggcatccagcgccgcatcctcggcttcctcaagcccgggttcagggatctccgaagcactcagagctggagcaactaagtccaaagagtttttattatatttagcggggtttgtcgatggggatgggagtataatagccagtatacgccccgaacagtcgcgtaaatttaaacatcgcttagaattacgttttacggtcacgcaaaaaacccaacgtaggtggtttttagataaattagtggatgaaataggcgtcgggtatgtgtatgatcagggcagcgtcagtcattataggttaagtcaaataaaaccgttacataatttcttaacgcaattacaaccctttttaaaattaaaacaaaaacaagccaatttagtgttaaaaataatagaacaattaccgagcgcgaaagaaagtcccgataaatttttagaagtctgtacctgggtggatcaaatagccgcgttaaatgattcaaaaacgaggaaaaccacgagcgaaaccgtcagagccgtgttagatagtctatcagaaaagaagaaaagcagtccg

SEQ ID NO: 245 - DNA, 1050 bp, artificial sequence
  MHP77(L16-24)
atgaacaccaagtacaacaaggagttcctgctctacctggccggcttcgtggacggcgacggctccatcattgcgcagatcaagccggaacagtgctacaagttcaagcaccggctcatgctgaccttcacagtgacccagaagacgcagaggcgctggatcctcgacaagctggtcgacgagatcggggtgggctacgtccgtgaccgcgggtcggtgtccgactacatcctctcccagatcaagcccctgcacaacttcctcacccagctccagccgttcctcaagctgaagcagaagcaggcgaaccttgtcctgaagatcatcgagcagctcccctcggccaaggagtccccggacaagttcctggaggtgtgcacgtgggtcgaccggatcgcggccctcaacgacagcaagacccgcaagacgacctcggagacggtgcgggcggtcctggactctctcccaggatccgtgggaggtctatcgccatctcaggcatccagcgccgcatcctcggcttcctcaagcccgggttcagggatctccgaagcactcagagctggagcaactaagtccaaagagtttttattatatttagcggggtttgtcgatggggatgggagtataatagccagtatacgccccgaacaatcgcgtaaatttaaacatcgcttagaattacgttttacggtcacgcaaaaaacccaacgtaggtggtttttagataaattagtggatgaaataggcgtcgggtatgtgtatgatcagggcagcgtcagtcattataggttaagtcgaataaaaccgttacataattttttaacgcaattacaaccctttttaaaattaaaacaaaaacaagccaacttagtgttaaaaataatagaacaattaccgagcgcgaaagagagtcccgataaatttttagaagtctgtacctgggcggatcaaatagccgcgttaaatgattcaaaaacgaggaaaaccacgagcgaaaccgtcagagccgtgttagatagtctatcagaaaagaagaaaagcagtccg

SEQ ID NO: 246 - DNA, 1050 bp, artificial sequence
  MHP77(L17-12)
atgaacaccaagtacaacaaggagttcctgctctatctagccggcttcgtggacgctgatggcagcttaattgcgcagatcaagccggaacagtgctacaagttcaagcaccggctcatgctgaccttcacagtgacccagaagacgcagaggcgctggttcctcgacaagatagtcgacgagatcggggtgggctacgtccgtgaccgcgggtcggtgtccgactacatcctctcccagatcaagcccctgcacaacttcctcacccagctacagccgttcctcaagctgaagcagaagcaggcgaacctcgtcctgaagatcatcgagcagctcccctcggccaaggagtccccggacaagttcctggaggtgtgcacgtgggtcgaccagatcgcggccctcaacgacagcaagacccgcaagacgacctcggagacggtgcgggcggtcctggactccctcccaggatccgtgggaggtctatcgccatctcaggcatccagcgccgcatcctcggcttcctcaagcccgggttcagggatctccgaagcactcagagctggagcaactaagtccaaagagtttttattatatttagcggggtttgtcgatggggatgggagtataatagccagtatacgccccgaacaatcgcgtaaatttaaacatcgcttagaattacgttttacggtcacgcaaaaaacccaacgtaggtggtttttagataaattagtggatgaaataggcgtcgggtatgtgtatgatcagggcagcgtcagtcattataggttgagtcaaataaaaccgttacataattttttaacgcaattacaaccctttttaaaattaaaacaaaaacaagccaatttagtgttaaaaataatagaacaattaccgagcgcgaaagaaagtcccgataaatttttagaagtctgtacctgggtggatcaaatagccgcgttaaatgattcaaaaacgaggaaaaccacgagcgaaaccgtcagagccgtgttagatagtttatcagaaaagaagaaaagcagtccg

SEQ ID NO: 247 - DNA, 1050 bp, artificial sequence
  MHP77(L18-01)
atgaacaccaagtacaacaaggagttcctgctctacctggccggcttcgtggacggcgacggctccatcattgcgcagatcaagccggaacagtgctacaagttcaagcaccggctcatgctgaccttcacagtgacccagaagacgcagaggcgctggttcctcgacaagctggtcgacgagatcggggtgggctacgtccgtgaccgcggaaccgcatccgactacatcctctcccagatcaagcccctgcacaacttcctcacccagctccagccgttcctcaagctgaagcagaagcaggcgaacctcgtcctgaagatcatcgagcagctcccctcggccaaggagtccccggacaagttcctggaggtgtgcacgtgggtcgaccagatcgcggccctcaacgacagcaagacccgcaagacgacctcggagacggtgcgggcggtcctggactccctcccaggatccgtgggaggtctatcgccatctcaggcatccagcgccgcatcctcggcttcctcaagcccgggttcagggatctccgaagcactcagagctggagcaactaagtccaaagagtttttattatatctagcggggtttgtcgatgctgatgggagtataatagccagtatacgccccgaacaatcgcgtaaatttaaacatcgcttagaattacgttttacggtcacgcaaaagtcactgaggagatggtttttagataaattagtggatgaaataggcgtcgggtatgtgtatgatcagggcagcgtcagtcattataggttaagtcaaataaaaccgttacataattttttaacgcaattacaaccctttttaaaattaaaacaaaaacaagccaatttagtgttaaaaataatagaacaattaccgagcgcgaaagaaagtcccgataaatttttagaagtctgtacctgggtggatcaaatagccgcgttaaatgattcaaaaacgaggaaaaccacgagcgaaaccgtcagagccgtgttagatagtttatcagaaaagaagaaaagcagtccg

SEQ ID NO: 248 - DNA, 1050 bp, artificial sequence
  MHP77(L18-12)
atgaacaccaagtacaacaaggagttcctgctctacctggccggcttcgtggacggcgacggctccatcattgcgcagatcaagccggaacagtgctacaagttcaagcaccggctcatgctgaccttcacagtgacccagaagacgcagaggcgctggttcctcgacaagctggtcgacgagatcggggtgggctacgtccgtgaccgcggaaccgcatccgactacatcctctcccagatcaagcccctgcacaacttcctcacccagctacagccgttcctcaagctgaagcagaagcaggcgaacctcgtcctgaagatcatcgagcagctcccctcggccaaggagtccccggacaagttcctggaggtgtgcacgtgggtcgaccagatcgcggccctcaacgacagcaagacccgcaagacgacctcggagacggtgcgggcggtcctggactccctcccaggatccgtgggaggtctatcgccatctcaggcatccagcgccgcatcctcggcttcctcaagcccgggttcagggatctccgaagcactcagagctggagcaactaagtccaaagagtttttattatatttagcggggtttgtcgatgctgatgggagtataatagccagtatacgccccgaacaatcgcgtaaatttaaacatcgcttagaattacgttttacggtcacgcaaaaaacccaacgtaggtggtttttagataaattagtggatgaaataggcgtcgggtatgtgtatgatcagggcagcgtcagtcattataggttaagtcaaataaaaccgttacataattttttaacgcaaatacaacccttctttaaattaaagcaaaaacaagccaatttagtgttaaaaataatagaacaattaccgagcgcgaaagaaagtcccgataaatttttagaagtctgtacctgggtggatcaaatagccgcgttaaatgattcaaaaacgaggaaaaccacgagcgaaaccgtcagagccgtgttagatagtttatcagaaaagaagaaaagcagtccg

SEQ ID NO: 249 - DNA, 1050 bp, artificial sequence
  MHP77(L17-01)
atgaacaccaagtacaacaaggagttcctgctctacctggccggcttcgtggacgctgatggctccatcattgcgcagatcaagccggaacagtgctacaagttcaagcaccggctcatgctgaccttcacagtgacccagaagacgcagaggcgctggttcctcgacaagatagtcgacgagatcggggtgggctacgttcgtgaccgcgggtcggtgtccgactacatcctctcccagatcaagcccctgcacaacttcctcacccagctacagccgttcctcaagctgaagcagaagcaggcgaacctcgtcctgaagatcatcgagcagctcccctcggccaaggagtccccggacaagttcctggaggtgtgcacgtgggtcgaccagatcgcggccctcaacgacagcaagacccgcaagacgacctcggagacggtgcgggcggtcctggactccctcccaggatccgtgggaggtctatcgccatctcaggcatccagcgccgcatcctcggcttcctcaagcccgggttcagggatctccgaagcactcagagctggagcaactaagtccaaagagtttttattatatttagcggggtttgtcgatggggatgggagtataatagccagtatacgccccgaacaatcgcgtaaatttaaacatcgcttagaattacgttttacggtcacgcaaaaaacccaacgtaggtggtttttagataaactagtggatgaaataggcgtcgggtatatttatgatcagggcagcgtcagtcattataggttgagtcaaataaaaccgttacataattttttaacgcaattacaaccctttttaaaattaaaacaaaaacaagccaatttagtgttaaaaataatagaacaattaccgagcgcgaaagaaagtcccgataaatttttagaagtctgtacctgggtggatcaaatagccgcgttaaatgattcaaaaacgaggaaaaccacgagcgaaaccgtcagagccgtgttagatagtttatcagaaaagaagaaaagcagtccg

SEQ ID NO: 250 - protein, 350 aa, artificial sequence
  MHP77.3
MNTKYNKEFLLYLAGFVDGDGSIIAQIKPEQCYKFKHRLMLTFTVTQKTQRRWFLDKLVDEIGVGYVRDRGSVSDYILSQIKPLHNFLTQLQPFLKLKQKQANLVLKIIEQLPSAKESPDKFLEVCTWVDQIAALNDSKTRKTTSETVRAVLDSLPGSVGGLSPSQASSAASSASSSPGSGISEALRAGATKSKEFLLYLAGFVDGDGSIIASIRPEQSRKFKHRLELRFTVTQKTQRRWFLDKLVDEIGVGKVYDQGSVSHYRLCQIKPLHNFLTQLQPFLKLKQKQANLVLKIIEQLPSAKESPDKFLEVCTWVDQIAALNDSKTRKTTSETVRAVLDSLSEKKKSSP

SEQ ID NO: 251 - protein, 350 aa, artificial sequence
  MHP77.3(L9-02)
MNTKYNKEFLLYLAGFVDSDGSIIAQIKPEQCYKFKHRLMLTFTVTQKTRRRWILDKLVDEIGVGYVRDRGSVSDYILSQKKPLHNFLTQLQPFLKLKQKQAVLVLKIIEQLPSAKESPDGFLEVCTWVDQVAALNDSKTRKTTSETVRAVLLSLPGSVGGLSPSQASSAASSASSSPGSGISEALRAGATKSKEFLLYLAGFVDGDGSIIASIRPEQSRKFKHRLELRFTVTQKTQRRWFLDKLVDEIGVGKVYDQGSVSHYRLCQIKPLHNFLTQLQPYLKLKQKQANLVLKIIEQLPSAKESPDKFLEVCTWVDQIAALNDSKTRKTTSETVRAVLDSLSEKKKSSP

SEQ ID NO: 252 - protein, 350 aa, artificial sequence
  MHP77.3(L9-11)
MNTKYNKEFLLYLAGFVDGDGSIIAQIKPEQCYKFKHRLMLTFTVTQKTKRRWFLDKLVDEIGVGYVRDRGSVSDYILSQKKPLHNFLTQLQPFLKLKQKQANLVLKIIEQLPSAKESPDGFLEVCTWVDQIAALNDSKTRKTTSETVRAVLLSLPGSVGGLSPSQASSAASSASSSPGSGISEALRAGATKSKEFLLYLAGFVDGDGSIIASIRPEQSRKFKHRLELRFTVTQKTQRRWFLDKLVDEIGVGKVYDQGSVSHYRLCQIKPLHNFLTQLQPFLKLKQKQANLVLKIIEQLPSAKESPDKFLEVCTWADQIAALNDSKTRKTTSETVRAVLDSLSEKKKSSP

SEQ ID NO: 253 - protein, 350 aa, artificial sequence
  MHP77.3(L9-12)
MNTKYNKEFLLYLAGFVDSDGSIIAQIKPEQCYKFKHRLMLTFTVTQKTQRRWILLKLVDEIGVGYVRDRGSVSDYILSQIKPLHNFLTQLQPFLKLKQKQANLVLKIIEQLPSAKESPDKFLEVCTWVDQIAALNDSKTRKTTSETVRAVLLSLPGSVGGLSPSQASSAASSASSSPGSGISEALRAGATKSKEFLLYLAGFVDGDGSIIASIRPEQSRKFKHRLELRFTVTQKTQRRWFLDELVDEIGVGKVYDQGSVSHYRLCQIKPLHNFLTQLQPYLKLKQKQANLVLKIIEQLPSAKESPDGFLEVCTWVDQIAALNDSKTRKTTSETVRAVLDSLSEKKKSSP

SEQ ID NO: 254 - DNA, 1083 bp, artificial sequence
  MHP77 plant optimized + NLS
atggcaccgaagaagaagcgcaaggtgcatatgaacaccaagtacaacaaggagttcctgctctacctggccggcttcgtggacggcgacggctccatcatcgcgcagatcaagccggagcagtgctacaagttcaagcaccgcctcatgctgaccttcaccgtgacccagaagacgcagaggcgctggttcctcgacaagctggtcgacgagatcggggtgggctacgtccgcgaccgcgggtcggtgtccgactacatcctctcccagatcaagcccctgcacaacttcctcacccagctccagccgttcctcaagctgaagcagaagcaggcgaacctcgtcctgaagatcatcgagcagctcccctcggccaaggagtccccggacaagttcctggaggtgtgcacgtgggtcgaccagatcgcggccctcaacgacagcaagacccgcaagacgacctcggagacggtgcgggcggtcctggactccctcccaggatccgtgggaggtctatcgccatctcaggcatccagcgccgcatcctcggcttcctcaagcccgggttcagggatctccgaagcactcagagctggagcaactaagtccaaggaattcctgctctacctggccggcttcgtggacggcgacggctccatcatcgcgtccatccgcccggagcagtcccgcaagttcaagcaccgcctcgagctgcgcttcaccgtgacccagaagacgcagaggcgctggttcctcgacaagctggtcgacgagatcggggtgggctacgtctacgaccaggggtcggtgtcccactaccgcctctcccagatcaagcccctgcacaacttcctcacccagctccagccgttcctcaagctgaagcagaagcaggcgaacctcgtcctgaagatcatcgagcagctcccctcggccaaggagtccccggacaagttcctggaggtgtgcacgtgggtcgaccagatcgcggccctcaacgacagcaagacccgcaagacgacctcggagacggtgcgggcggttctagactccctcagcgagaagaagaagtcgtccccctga

SEQ ID NO: 255 - DNA, 1083 bp, artificial sequence
  MHP77.3 plant optimized + NLS
atggcaccgaagaagaagcgcaaggtgcatatgaacaccaagtacaacaaggagttcctgctctacctggccggcttcgtggacggcgacggctccatcatcgcgcagatcaagccggagcagtgctacaagttcaagcaccgcctcatgctgaccttcaccgtgacccagaagacgcagaggcgctggttcctcgacaagctggtcgacgagatcggggtgggctacgtccgcgaccgcgggtcggtgtccgactacatcctctcccagatcaagcccctgcacaacttcctcacccagctccagccgttcctcaagctgaagcagaagcaggcgaacctcgtcctgaagatcatcgagcagctcccctcggccaaggagtccccggacaagttcctggaggtgtgcacgtgggtcgaccagatcgcggccctcaacgacagcaagacccgcaagacgacctcggagacggtgcgggcggtcctggactccctcccaggatccgtgggaggtctatcgccatctcaggcatccagcgccgcatcctcggcttcctcaagcccgggttcagggatctccgaagcactcagagctggagcaactaagtccaaggaattcctgctctacctggcgggcttcgtggacggcgacggctccatcatcgcgtccatccgcccggagcagtcccgcaagttcaagcaccgcctcgagctgcgcttcaccgtgacccagaagacgcagaggcgctggttcctcgacaagctggtcgacgagatcggggtgggcaaggtctacgaccaggggtcggtgtcccactaccgcctctgccagatcaagcccctgcacaacttcctcacccagctccagccgttcctcaagctgaagcagaagcaggcgaacctcgtcctgaagatcatcgagcagctcccctcggccaaggagtccccggacaagttcctggaggtgtgcacgtgggtcgaccagatcgcggccctcaacgacagcaagacccgcaagacgacctcggagacggtgcgggcggttctagactccctcagcgagaagaagaagtcgtccccctga

SEQ ID NO: 256 - DNA, 1272 bp, artificial sequence
  MHP77(L9-02)plant optimized + NLS and ST-LS1 INTRON2
atggcaccgaagaagaagcgcaaggtgcatatgaacaccaagtacaacaaggagttcctgctctacctggccggcttcgtggacagcgacggctccatcatcgcgcagatcaagccggagcagtgctacaagttcaagcaccgcctcatgctgaccttcaccgtgacccagaagacgcgcaggcgctggattctcgacaagctggtcgacgagatcggggtgggctacgtccgcgaccgcgggtcggtgtccgactacatcctctcccagaagaagcccctgcacaacttcctcacccagctgcagccgttcctcaagctgaagcagaagcaggcggtcctcgtcctgaagatcatcgagcagctcccctcggccaaggagtccccggacggcttcctggaggtaagtttctgcttctacctttgatatatatataataattatcattaattagtagtaatataatatttcaaatatttttttcaaaataaaagaatgtagtatatagcaattgcttttctgtagtttataagtgtgtatattttaatttataacttttctaatatatgaccaaaacatggtgatgtgcaggtgtgcacgtgggtcgaccaggtcgcggccctcaacgacagcaagacccgcaagacgacctcggagacggtgcgggcggtcctgctgtccctcccaggatccgtgggaggtctatcgccatctcaggcatccagcgccgcatcctcggcttcctcaagcccgggttcagggatctccgaagcactcagagctggagcaactaagtccaaggaattcctgctctacctggccggcttcgtggacggcgacggctccatcatcgcgtccatccgcccggagcagtcccgcaagttcaagcaccgcctcgagctgcgcttcaccgtgacccagaagacgcagaggcgctggttcctcgacaagctggtcgacgagatcggggtgggctacgtctacgaccaggggtcggtgtcccactaccgcctctcccagatcaagcccctgcacaacttcctcacccagctccagccgtacctcaagctgaagcagaagcaggcgaacctcgtcctgaagatcatcgagcagctcccctcggccaaggagtccccggacaagttcctggaggtgtgcacgtgggtcgaccagatcgcggccctcaacgacagcaagacccgcaagacgacctcggagacggtgcgggcggttctagactccctcagcgagaagaagaagtcgtccccctga

SEQ ID NO: 257 - DNA, 1272 bp, artificial sequence
  MHP77(L9-11)plant optimized + NLS and ST-LS1 INTRON2
atggcaccgaagaagaagcgcaaggtgcatatgaacaccaagtacaacaaggagttcctgctctacctggccggcttcgtggacggcgacggctccatcatcgcgcagatcaagccggagcagtgctacaagttcaagcaccgcctcatgctgaccttcaccgtgacccagaagacgaagaggcgctggttcctcgacaagctggtcgacgagatcggggtgggctacgtccgcgaccgcgggtcggtgtccgactacatcctctcccagaagaagcccctgcacaacttcctcacccagctgcagccgttcctcaagctgaagcagaagcaggcgaacctcgtcctgaagatcatcgagcagctcccctcggccaaggagtccccggacggcttcctggaggtaagtttctgcttctacctttgatatatatataataattatcattaattagtagtaatataatatttcaaatatttttttcaaaataaaagaatgtagtatatagcaattgcttttctgtagtttataagtgtgtatattttaatttataacttttctaatatatgaccaaaacatggtgatgtgcaggtgtgcacgtgggtcgaccagatcgcggccctcaacgacagcaagacccgcaagacgacctcggagacggtgcgggcggtcctgctgtccctcccaggatccgtgggaggtctatcgccatctcaggcatccagcgccgcatcctcggcttcctcaagcccgggttcagggatctccgaagcactcagagctggagcaactaagtccaaggaattcctgctctacctggccggcttcgtggacggcgacggctccatcatcgcgtccatccgcccggagcagtcccgcaagttcaagcaccgcctcgagctgcgcttcaccgtgacccagaagacgcagaggcgctggttcctcgacaagctggtcgacgagatcggggtgggctacgtctacgaccaggggtcggtgtcccactaccgcctctcccagatcaagcccctgcacaacttcctcacccagctccagccgttcctcaagctgaagcagaagcaggcgaacctcgtcctgaagatcatcgagcagctcccctcggccaaggagtccccggacaagttcctggaggtgtgcacgtgggcggaccagatcgcggccctcaacgacagcaagacccgcaagacgacctcggagacggtgcgggcggttctagactccctcagcgagaagaagaagtcgtccccctga

SEQ ID NO: 258 - DNA, 1272 bp, artificial sequence
  MHP77(L9-12)plant optimized + NLS and ST-LS1 INTRON2
atggcaccgaagaagaagcgcaaggtgcatatgaacaccaagtacaacaaggagttcctgctctacctggccggcttcgtggacagcgacggctccatcatcgcgcagatcaagccggagcagtgctacaagttcaagcaccgcctcatgctgaccttcaccgtgacccagaagacgcagaggcgctggattctcctgaagctggtcgacgagatcggggtgggctacgtccgcgaccgcgggtcggtgtccgactacatcctctcccagatcaagcccctgcacaacttcctcacccagctgcagccgttcctcaagctgaagcagaagcaggcgaacctcgtcctgaagatcatcgagcagctcccctcggccaaggagtccccggacaagttcctggaggtaagtttctgcttctacctttgatatatatataataattatcattaattagtagtaatataatatttcaaatatttttttcaaaataaaagaatgtagtatatagcaattgcttttctgtagtttataagtgtgtatattttaatttataacttttctaatatatgaccaaaacatggtgatgtgcaggtgtgcacgtgggtcgaccagatcgcggccctcaacgacagcaagacccgcaagacgacctcggagacggtgcgggcggtcctgctgtccctcccaggatccgtgggaggtctatcgccatctcaggcatccagcgccgcatcctcggcttcctcaagcccgggttcagggatctccgaagcactcagagctggagcaactaagtccaaggaattcctgctctacctggccggcttcgtggacggcgacggctccatcatcgcgtccatccgcccggagcagtcccgcaagttcaagcaccgcctcgagctgcgcttcaccgtgacccagaagacgcagaggcgctggttcctcgacgagctggtcgacgagatcggggtgggctacgtctacgaccaggggtcggtgtcccactaccgcctctcccagatcaagcccctgcacaacttcctcacccagctccagccgtacctcaagctgaagcagaagcaggcgaacctcgtcctgaagatcatcgagcagctcccctcggccaaggagtccccggacggattcctggaggtgtgcacgtgggtcgaccagatcgcggccctcaacgacagcaagacccgcaagacgacctcggagacggtgcgggcggttctagactccctcagcgagaagaagaagtcgtccccctga

SEQ ID NO: 259 - DNA, 1272 bp, artificial sequence
  MHP77.3(L9-02)plant optimized + NLS and ST-LS1 INTRON2
atggcaccgaagaagaagcgcaaggtgcatatgaacaccaagtacaacaaggagttcctgctctacctggccggcttcgtggacagcgacggctccatcatcgcgcagatcaagccggagcagtgctacaagttcaagcaccgcctcatgctgaccttcaccgtgacccagaagacgcgcaggcgctggattctcgacaagctggtcgacgagatcggggtgggctacgtccgcgaccgcgggtcggtgtccgactacatcctctcccagaagaagcccctgcacaacttcctcacccagctgcagccgttcctcaagctgaagcagaagcaggcggtcctcgtcctgaagatcatcgagcagctcccctcggccaaggagtccccggacggcttcctggaggtaagtttctgcttctacctttgatatatatataataattatcattaattagtagtaatataatatttcaaatatttttttcaaaataaaagaatgtagtatatagcaattgcttttctgtagtttataagtgtgtatattttaatttataacttttctaatatatgaccaaaacatggtgatgtgcaggtgtgcacgtgggtcgaccaggtcgcggccctcaacgacagcaagacccgcaagacgacctcggagacggtgcgggcggtcctgctgtccctcccaggatccgtgggaggtctatcgccatctcaggcatccagcgccgcatcctcggcttcctcaagcccgggttcagggatctccgaagcactcagagctggagcaactaagtccaaggaattcctgctctacctggccggcttcgtggacggcgacggctccatcatcgcgtccatccgcccggagcagtcccgcaagttcaagcaccgcctcgagctgcgcttcaccgtgacccagaagacgcagaggcgctggttcctcgacaagctggtcgacgagatcggggtgggcaaggtctacgaccaggggtcggtgtcccactaccgcctctgccagatcaagcccctgcacaacttcctcacccagctccagccgtacctcaagctgaagcagaagcaggcgaacctcgtcctgaagatcatcgagcagctcccctcggccaaggagtccccggacaagttcctggaggtgtgcacgtgggtcgaccagatcgcggccctcaacgacagcaagacccgcaagacgacctcggagacggtgcgggcggttctagactccctcagcgagaagaagaagtcgtccccctga

SEQ ID NO: 260 - DNA, 1272 bp, artificial sequence
  MHP77.3(L9-11)plant optimized + NLS and ST-LS1 INTRON2
atggcaccgaagaagaagcgcaaggtgcatatgaacaccaagtacaacaaggagttcctgctctacctggccggcttcgtggacggcgacggctccatcatcgcgcagatcaagccggagcagtgctacaagttcaagcaccgcctcatgctgaccttcaccgtgacccagaagacgaagaggcgctggttcctcgacaagctggtcgacgagatcggggtgggctacgtccgcgaccgcgggtcggtgtccgactacatcctctcccagaagaagcccctgcacaacttcctcacccagctgcagccgttcctcaagctgaagcagaagcaggcgaacctcgtcctgaagatcatcgagcagctcccctcggccaaggagtccccggacggcttcctggaggtaagtttctgcttctacctttgatatatatataataattatcattaattagtagtaatataatatttcaaatatttttttcaaaataaaagaatgtagtatatagcaattgcttttctgtagtttataagtgtgtatattttaatttataacttttctaatatatgaccaaaacatggtgatgtgcaggtgtgcacgtgggtcgaccagatcgcggccctcaacgacagcaagacccgcaagacgacctcggagacggtgcgggcggtcctgctgtccctcccaggatccgtgggaggtctatcgccatctcaggcatccagcgccgcatcctcggcttcctcaagcccgggttcagggatctccgaagcactcagagctggagcaactaagtccaaggaattcctgctctacctggccggcttcgtggacggcgacggctccatcatcgcgtccatccgcccggagcagtcccgcaagttcaagcaccgcctcgagctgcgcttcaccgtgacccagaagacgcagaggcgctggttcctcgacaagctggtcgacgagatcggggtgggcaaggtctacgaccaggggtcggtgtcccactaccgcctctgccagatcaagcccctgcacaacttcctcacccagctccagccgttcctcaagctgaagcagaagcaggcgaacctcgtcctgaagatcatcgagcagctcccctcggccaaggagtccccggacaagttcctggaggtgtgcacgtgggcggaccagatcgcggccctcaacgacagcaagacccgcaagacgacctcggagacggtgcgggcggttctagactccctcagcgagaagaagaagtcgtccccctga

SEQ ID NO: 261 - DNA, 1272 bp, artificial sequence
  MHP77.3(L9-12)plant optimized + NLS and ST-LS1 INTRON2
atggcaccgaagaagaagcgcaaggtgcatatgaacaccaagtacaacaaggagttcctgctctacctggccggcttcgtggacagcgacggctccatcatcgcgcagatcaagccggagcagtgctacaagttcaagcaccgcctcatgctgaccttcaccgtgacccagaagacgcagaggcgctggattctcctgaagctggtcgacgagatcggggtgggctacgtccgcgaccgcgggtcggtgtccgactacatcctctcccagatcaagcccctgcacaacttcctcacccagctgcagccgttcctcaagctgaagcagaagcaggcgaacctcgtcctgaagatcatcgagcagctcccctcggccaaggagtccccggacaagttcctggaggtaagtttctgcttctacctttgatatatatataataattatcattaattagtagtaatataatatttcaaatatttttttcaaaataaaagaatgtagtatatagcaattgcttttctgtagtttataagtgtgtatattttaatttataacttttctaatatatgaccaaaacatggtgatgtgcaggtgtgcacgtgggtcgaccagatcgcggccctcaacgacagcaagacccgcaagacgacctcggagacggtgcgggcggtcctgctgtccctcccaggatccgtgggaggtctatcgccatctcaggcatccagcgccgcatcctcggcttcctcaagcccgggttcagggatctccgaagcactcagagctggagcaactaagtccaaggaattcctgctctacctggccggcttcgtggacggcgacggctccatcatcgcgtccatccgcccggagcagtcccgcaagttcaagcaccgcctcgagctgcgcttcaccgtgacccagaagacgcagaggcgctggttcctcgacgagctggtcgacgagatcggggtgggcaaggtctacgaccaggggtcggtgtcccactaccgcctctgccagatcaagcccctgcacaacttcctcacccagctccagccgtacctcaagctgaagcagaagcaggcgaacctcgtcctgaagatcatcgagcagctcccctcggccaaggagtccccggacggattcctggaggtgtgcacgtgggtcgaccagatcgcggccctcaacgacagcaagacccgcaagacgacctcggagacggtgcgggcggttctagactccctcagcgagaagaagaagtcgtccccctga

SEQ ID NO: 262 - protein, 350 aa, artificial sequence
  MHP77.3(15)
MNTKYNKEFLLYLAGFVDSDGSIIAQIKPEQCYKFKHRLMLTFTVTQKTQRRWFLDKLVDEIGVGYVRDRGSVSDYILSQIKPLHNFLTQLQPFLKLKQKQANLVLKIIEQLPSAKESPDKFLEVCTWVDQIAALNDSKTRKTTSETVRAVLDSLPGSVGGLSPSQASSAASSASSSPGSGISEALRAGATKSKEFLLYLAGFVDGDGSIIASIRPEQSRKFKHRLELRFTVTQKTQRRWFLDKLVDEIGVGKVYDQGSVSHYRLCQIKPLHNFLTQLQPFLKLKQKQANLVLKIIEQLPSAKESPDKFLEVCTWVDQIAALNDSKTRKTTSETVRAVLDSLSEKKKSSP

SEQ ID NO: 263 - DNA, 1272 bp, artificial sequence
  MHP77.3(15)
atggcaccgaagaagaagcgcaaggtgcatatgaacaccaagtacaacaaggagttcctgctctacctggccggcttcgtggacagcgacggctccatcatcgcgcagatcaagccggagcagtgctacaagttcaagcaccgcctcatgctgaccttcaccgtgacccagaagacgcagaggcgctggttcctcgacaagctggtcgacgagatcggggtgggctacgtccgcgaccgcgggtcggtgtccgactacatcctctcccagatcaagcccctgcacaacttcctcacccagctgcagccgttcctcaagctgaagcagaagcaggcgaacctcgtcctgaagatcatcgagcagctcccctcggccaaggagtccccggacaagttcctggaggtaagtttctgcttctacctttgatatatatataataattatcattaattagtagtaatataatatttcaaatatttttttcaaaataaaagaatgtagtatatagcaattgcttttctgtagtttataagtgtgtatattttaatttataacttttctaatatatgaccaaaacatggtgatgtgcaggtgtgcacgtgggtcgaccagatcgcggccctcaacgacagcaagacccgcaagacgacctcggagacggtgcgggcggtcctggactccctcccaggatccgtgggaggtctatcgccatctcaggcatccagcgccgcatcctcggcttcctcaagcccgggttcagggatctccgaagcactcagagctggagcaactaagtccaaggaattcctgctctacctggcgggcttcgtggacggcgacggctccatcatcgcgtccatccgcccggagcagtcccgcaagttcaagcaccgcctcgagctgcgcttcaccgtgacccagaagacgcagaggcgctggttcctcgacaagctggtcgacgagatcggggtgggcaaggtctacgaccaggggtcggtgtcccactaccgcctctgccagatcaagcccctgcacaacttcctcacccagctccagccgttcctcaagctgaagcagaagcaggcgaacctcgtcctgaagatcatcgagcagctcccctcggccaaggagtccccggacaagttcctggaggtgtgcacgtgggtcgaccagatcgcggccctcaacgacagcaagacccgcaagacgacctcggagacggtgcgggcggttctagactccctcagcgagaagaagaagtcgtccccctga

SEQ ID NO: 264 - DNA, 1016 bp, artificial sequence
  MHP77HR1
atacataccgccctaaggacctagatagtgtgttggtccaaaaaaccaacatagaaacatcaaagtttttgccattaatagaaaagattgatggacaactcatttccaaagccatacagtcaattgtaatcatcttcaacccaatcaaaaactcatagtttataaccgttctttggccagcttcacggatagtctgtccctctgagactgaaagtagcctagaagtgggtgaataggctaaacctaaaatttccaccacaaactttgaaataatgtcaaataagcagttcaactggtgcaggccagttcaaccgctattaaggccggttgaaccactctaaaccggcccaaccgtgagagaggatcaaggctatgaacaacgcagagactaatgagagattcctttaagaaaagagctcacgggataaattaggcataaatagggaaaatttgtgtggataagatccacacacaagacaactcgatcgatgtcttctttgctaaagataattcacaacgatttgaattaaagcaaagacacaaagacgcaaggatttatcctgaggttcggccacaccataaaggtgccctactccctgttgaggagcccacaaaggaccaagtcttttccaactctaatcctccacaaatcgaccacaaaggtcaaggcaaactctttctcaactttgctcaacgagtgagtgaaacaaacttcttggggtcgtccacaaatttggagactcccaagcaacctcaaactgccaaggaactcgaaggttccaagggcaacaaatctgcacaagaagtgtttgcagtgggctcaagagatgagaaaggggggggagagaaaactaagtctaaaagtgaaaaactcaaactttacaccaagggcccttcaatcaagcgatgagggagcgatttggggtgtgagagagttgggagcttttatctcaagttaggtcagcaatgaatgcgtggagcaaccataatgaatgaggagagagacatgagggggt

SEQ ID NO: 265 - DNA, 898 bp, artificial sequence
  MHP77HR2
ctttggcaagcaattgcatgcgagtaaacaagtaattaagagtaaggttcaccggttaggttccttacctcggtgtaaagcttggaacatggttgttgaggttagttaggttccttacccacaagtcacactctcccacatggtgtgctcatacctaagttatacttgatcagcctagaccacttggcgctcttcacaccccactctactaatgtgctcttcgtgtctcctgtggggcgagcacggtaccccttacaatgcctcctttagagccacacacgatttcatgcaggattccatggagccataacctccaaggcacctaggaggtggaaacctctaaaagtaacaagacaatgatcttcctagtgataacttgataatgtgagttagtaagaggtttggggcgaaggctcaagcatgctcaacaagtgctcctattgctcagcttagggagcacacatttacactcctactttttatagccccacttcccacaactagacactataacactttttgagaaaactacacattagtggacactccataatacaacccacggatagcccatatttgaattccgatgactatatttcaattaaatgcgtgttagtcgtcatagaaagtgtttagtgaacagtctatctgttaatttttaacatgtctataaacttcctaatttatgtccccttttaagaatgtgcgacagatagtctgcctttgaggcccatatagtacaccgaccaaatatttgcattcaccgaaactcccaagtttctatccactatctaaaacagtgtagagacagtctacatgaggggccccaatagtccatcggtcaaaaaacacataaactttaaagtttttgtccatcacttgaattagtatgacatac

SEQ ID NO: 266 - DNA, 22 bp, artificial sequence
  MHP77 target site qPCR probe
actaattcaagtgatggacaaa

SEQ ID NO: 267 - DNA, 23 bp, artificial sequence
  MHP77_forward primer
tccttagggcggtatgtatgtca

SEQ ID NO: 268 - DNA, 26 bp, artificial sequence
  MHP77_reverse primer
catcggtcaaaaaacacataaacttt

SEQ ID NO: 269 - DNA, 22 bp, zea mays
gatggtgacgtacgtgccctac

SEQ ID NO: 270 - protein, 350 aa, artificial sequence
  MS26+
MNTKYNKEFLLYLAGFVDGDGSIIAQIDPQQSYKFKHSLRLRFTVTQKTQRRWFLDKLVDEIGVGKVRDRGSVSDYILCQIKPLHNFLTQLQPFLKLKQKQANLVLKIIEQLPSAKESPDKFLEVCTWVDQIAALNDSKTRKTTSETVRAVLDSLPGSVGGLSPSQASSAASSASSSPGSGISEALRAGATKSKEFLLYLAGFVDGDGSICASIDPNQSCKFKHQLRLRFTVTQKTQRRWFLDKLVDEIGVGKVYDRGSVSDYRLCQIKPLHNFLTQLQPFLKLKQKQANLVLKIIEQLPSAKESPDKFLEVCTWVDQIAALNDSKTRKTTSETVRAVLDSLSEKKKSSP

SEQ ID NO: 271 - protein, 350 aa, artificial sequence
  MS26++
MNTKYNKEFLLYLAGFVDGDGSIIAQITPQQSYKFKHALRLRFTVTQKTQRRWFLDKLVDEIGVGKVRDRGSVSDYILSQKKPLHNFLTQLQPFLKLKQKQANLVLKIIEQLPSAKESPDKFLEVCTWVDQIAALNDSKTRKTTSETVRAVLDSLPGSVGGLSPSQASSAASSASSSPGSGISEALRAGATKSKEFLLYLAGFVDGDGSIMASITPNQSCKFKHQLRLRFTVTQKTQRRWFLDKLVDEIGVGKVYDRGSVSDYRLSQKKPLHNFLTQLQPFLKLKQKQANLVLKIIEQLPSAKESPDKFLEVCTWVDQIAALNDSKTRKTTSETVRAVLDSLSEKKKSSP

SEQ ID NO: 272 - protein, 350 aa, artificial sequence
  MS26+(7)
MNTKYNKEFLLYLAGIVDGDGSIIAQIDPQQSYKFKHSLRLRFTVTQKTQRRWFLDKLVDEIGVGKVRDRGSVSDYILCQIKPLHNFLTQLQPFLKLKQKQANLVLKIIEQLPSAKESPDKFLEVCTWVDQIAALNDSKTRKTTSETVRAVLDSLPGSVGGLSPSQASSAASSASSSPGSGISEGLRAGATKSKEFLLYLAGFVDGDGSICASIDPNQSCKFKHQLRLRFTVTQKTQRRWFLDELVDEIGVGKVYDRGSVSDYRLCQIKPLHNFLTQLQPFLKLKQKQANLVLKIIEQLPSAKESPDKFLEVCTWADQIAALNDSKTRKTTSETVRAVLDSLSEKKKSSP

SEQ ID NO: 273 - protein, 350 aa, artificial sequence
  MS26+(15)
MNTKYNKEFLLYLAGFVDSDGSIIAQIDPQQSYKFKHSLRLRFTVTQKTQRRWFLDKLVDEIGVGKVRDRGSVSDYILCQIKPLHNFLTQLQPFLKLKQKQANLVLKIIEQLPSAKESPDKFLEVCTWVDQIAALNDSKTRKTTSETVRAVLDSLPGSVGGLSPSQASSAASSASSSPGSGISEALRAGATKSKEFLLYLAGFVDGDGSICASIDPNQSCKFKHQLRLRFTVTQKTQRRWFLDKLVDEIGVGKVYDRGSVSDYRLCQIKPLHNFLTQLQPFLKLKQKQANLVLKIIEQLPSAKESPDKFLEVCTWVDQIAALNDSKTRKTTSETVRAVLDSLSEKKKSSP

SEQ ID NO: 274 - protein, 350 aa, artificial sequence
  MS26+(B65)
MNTKYNKEFLLYLAGFVDGDGCIIAQIDPQQSYKFKHSLRLRFTVTQKTKRRWFLDKLVDEIGVGKVRDRKSVSDYILCQIKPLHNFLTQLQPFLKLKQKQANLVLKIIEQLPSAKESPDKFLEVCTWVDQIAALNDSKTRKTTSETVRAVLDSLPGSVGGLSPSQASSAASSASSSPGSGISEALRAGATKSKEFLLYLAGFVDGDGSICASIDPNQSCKFKHQLRLRFTVTQKTQRRWFLDKLVDEIGVGKVYDRKSVSDYRLCQIKPLHNFLTQLQPFLKLKQKQANLVLKIIEQLPSAKESPDKFLEVCTWVDQIAALNDSKTRKTTSETVRAVLDSLSEKKKSSP

SEQ ID NO: 275 - protein, 350 aa, artificial sequence
  MS26++(15)
MNTKYNKEFLLYLAGFVDSDGSIIAQITPQQSYKFKHALRLRFTVTQKTQRRWFLDKLVDEIGVGKVRDRGSVSDYILSQKKPLHNFLTQLQPFLKLKQKQANLVLKIIEQLPSAKESPDKFLEVCTWVDQIAALNDSKTRKTTSETVRAVLDSLPGSVGGLSPSQASSAASSASSSPGSGISEALRAGATKSKEFLLYLAGFVDGDGSIMASITPNQSCKFKHQLRLRFTVTQKTQRRWFLDKLVDEIGVGKVYDRGSVSDYRLSQKKPLHNFLTQLQPFLKLKQKQANLVLKIIEQLPSAKESPDKFLEVCTWVDQIAALNDSKTRKTTSETVRAVLDSLSEKKKSSP

SEQ ID NO: 276 - DNA, 1050 bp, artificial sequence
  MS26+ no intron
atgaacaccaagtacaacaaggagttcctgctctacctggccggcttcgtggacggcgacggctccatcatcgcgcagatcgacccgcagcagtcctacaagttcaagcactccctccgcctgcgcttcaccgtgacccagaagacgcagaggcgctggttcctcgacaagctggtcgacgagatcggggtgggcaaggtccgcgaccgcgggtcggtgtccgactacatcctctgccagatcaagcccctgcacaacttcctcacccagctccagccgttcctcaagctgaagcagaagcaggcgaacctcgtcctgaagatcatcgagcagctcccctcggccaaggagtccccggacaagttcctggaggtgtgcacgtgggtcgaccagatcgcggccctcaacgacagcaagacccgcaagacgacctcggagacggtgcgggcggtcctggactccctcccaggatccgtgggaggtctatcgccatctcaggcatccagcgccgcatcctcggcttcctcaagcccgggttcagggatctccgaagcactcagagctggagcaactaagtccaaggaattcctgctctacctggcgggcttcgtggacggcgacggctccatctgcgcgtccatcgacccgaaccagtcctgcaagttcaagcaccagctccgcctgcgcttcaccgtgacccagaagacgcagaggcgctggttcctcgacaagctggtcgacgagatcggggtgggcaaggtctacgaccgcgggtcggtgtccgactaccgcctctgccagatcaagcccctgcacaacttcctcacccagctccagccgttcctcaagctgaagcagaagcaggcgaacctcgtcctgaagatcatcgagcagctcccctcggccaaggagtccccggacaagttcctggaggtgtgcacgtgggtcgaccagatcgcggccctcaacgacagcaagacccgcaagacgacctcggagacggtgcgggcggttctagactccctcagcgagaagaagaagtcgtccccc

SEQ ID NO: 277 - DNA, 1050 bp, artificial sequence
  MS26+(15) no intron
atgaacaccaagtacaacaaggagttcctgctctacctggccggcttcgtggactccgacggctccatcatcgcgcagatcgacccgcagcagtcctacaagttcaagcactccctccgcctgcgcttcaccgtgacccagaagacgcagaggcgctggttcctcgacaagctggtcgacgagatcggggtgggcaaggtccgcgaccgcgggtcggtgtccgactacatcctctgccagatcaagcccctgcacaacttcctcacccagctgcagccgttcctcaagctgaagcagaagcaggcgaacctcgtcctgaagatcatcgagcagctcccctcggccaaggagtccccggacaagttcctggaggtgtgcacgtgggtcgaccagatcgcggccctcaacgacagcaagacccgcaagacgacctcggagacggtgcgggcggtcctggactccctcccaggatccgtgggaggtctatcgccatctcaggcatccagcgccgcatcctcggcttcctcaagcccgggttcagggatctccgaagcactcagagctggagcaactaagtccaaggaattcctgctctacctggcgggcttcgtggacggcgacggctccatctgcgcgtccatcgacccgaaccagtcctgcaagttcaagcaccagctccgcctgcgcttcaccgtgacccagaagacgcagaggcgctggttcctcgacaagctggtcgacgagatcggggtgggcaaggtctacgaccgcgggtcggtgtccgactaccgcctctgccagatcaagcccctgcacaacttcctcacccagctccagccgttcctcaagcttaagcagaagcaggcgaacctcgtcctgaagatcatcgagcagctcccctcggccaaggagtccccggacaagttcctggaggtgtgcacgtgggtcgaccagatcgcggccctcaacgacagcaagacccgcaagacgacctcggagacggtgcgggcggttctagactccctcagcgagaagaagaagtcgtccccc

SEQ ID NO: 278 - DNA, 1050 bp, artificial sequence
  MS26+(B65) no intron
atgaacaccaagtacaacaaggagttcctgctctacctggccggcttcgtggacggcgacggctgcatcatcgcgcagatcgacccgcagcagtcctacaagttcaagcactccctccgcctgcgcttcaccgtgacccagaagacgaagaggcgctggttcctcgacaagctggtcgacgagatcggggtgggcaaggtccgcgaccgcaagtcggtgtccgactacatcctctgccagatcaagcccctgcacaacttcctcacccagctgcagccgttcctcaagctgaagcagaagcaggcgaacctcgtcctgaagatcatcgagcagctcccctcggccaaggagtccccggacaagttcctggaggtgtgcacgtgggtcgaccagatcgcggccctcaacgacagcaagacccgcaagacgacctcggagacggtgcgggcggtcctggactccctcccaggatccgtgggaggtctatcgccatctcaggcatccagcgccgcatcctcggcttcctcaagcccgggttcagggatctccgaagcactcagagctggagcaactaagtccaaggaattcctgctctacctggcgggcttcgtggacggcgacggctccatctgcgcgtccatcgacccgaaccagtcctgcaagttcaagcaccagctccgcctgcgcttcaccgtgacccagaagacgcagaggcgctggttcctcgacaagctggtcgacgagatcggggtgggcaaggtctacgaccgcaagtcggtgtccgactaccgcctctgccagatcaagcccctgcacaacttcctcacccagctccagccgttcctcaagcttaagcagaagcaggcgaacctcgtcctgaagatcatcgagcagctcccctcggccaaggagtccccggacaagttcctggaggtgtgcacgtgggtcgaccagatcgcggccctcaacgacagcaagacccgcaagacgacctcggagacggtgcgggcggttctagactccctcagcgagaagaagaagtcgtccccc

SEQ ID NO: 279 - DNA, 1050 bp, artificial sequence
  MS26++ no intron
atgaacaccaagtacaacaaggagttcctcctctacctggcaggtttcgtggacggcgatgggtctatcatcgcccagattaccccgcaacagtcctacaagttcaagcacgccctgcggctgaggttcacggtcactcagaagacgcagcgcaggtggttcctcgataagctggtcgacgaaatcggagtcggcaaggtgcgggacaggggctctgtcagcgactacatcctctcccagaagaagccgctccacaacttcctgacccagctgcagcccttcctcaagctcaagcagaagcaggccaacctggtgctcaagatcatcgagcagctgccatctgccaaggagtcaccagacaagttccttgaggtctgcacctgggtcgatcagatcgctgccctgaacgactccaagacgaggaagaccacctccgagaccgtcagggctgtgctggactcactcccaggatccgttggcggtctcagcccttctcaggctagctcggctgcttcctcagccagcagctcacctggctccggtatcagcgaggctctcagagcaggtgccaccaagtccaaggagttcctcctgtacctggcaggcttcgttgacggcgacggctcgatcatggcgtccattaccccgaaccagtcgtgtaagttcaagcatcagctgcgcctgcgctttaccgtcacgcagaagacccagaggcgctggttcctggacaaactggtggacgagatcggggtcgggaaggtgtacgacagagggagcgttagcgactaccggctgtcccagaagaagccgctccacaacttcctgacgcagctccaacccttcctgaagctgaagcagaagcaggcgaaccttgtgctgaagatcattgagcagctgccgagcgccaaggagagccctgacaagttcctggaggtctgcacctgggtcgaccagatcgctgccctcaacgactccaagaccaggaagaccacgagcgagaccgttcgggctgtcctggacagcctctccgagaagaagaagtcgagcccg

SEQ ID NO: 280 - DNA, 1050 bp, artificial sequence
  MS26++(15) no intron
atgaacaccaagtacaacaaggagttcctcctctacctggcaggtttcgtggactccgatgggtctatcatcgcccagattaccccgcaacagtcctacaagttcaagcacgccctgcggctgaggttcacggtcactcagaagacgcagcgcaggtggttcctcgataagctggtcgacgaaatcggagtcggcaaggtgcgggacaggggctctgtcagcgactacatcctctcccagaagaagccgctccacaacttcctgacccagctgcagcccttcctcaagctcaagcagaagcaggccaacctggtgctcaagatcatcgagcagctgccatctgccaaggagtcaccagacaagttccttgaggtctgcacctgggtcgatcagatcgctgccctgaacgactccaagacgaggaagaccacctccgagaccgtcagggctgtgctggactcactcccaggatccgttggcggtctcagcccttctcaggctagctcggctgcttcctcagccagcagctcacctggctccggtatcagcgaggctctcagagcaggtgccaccaagtccaaggagttcctcctgtacctggcaggcttcgttgacggcgacggctcgatcatggcgtccattaccccgaaccagtcgtgtaagttcaagcatcagctgcgcctgcgctttaccgtcacgcagaagacccagaggcgctggttcctggacaaactggtggacgagatcggggtcgggaaggtgtacgacagagggagcgttagcgactaccggctgtcccagaagaagccgctccacaacttcctgacgcagctccaacccttcctgaagctgaagcagaagcaggcgaaccttgtgctgaagatcattgagcagctgccgagcgccaaggagagccctgacaagttcctggaggtctgcacctgggtcgaccagatcgctgccctcaacgactccaagaccaggaagaccacgagcgagaccgttcgggctgtcctggacagcctctccgagaagaagaagtcgagcccg

SEQ ID NO: 281 - DNA, 22 bp, zea mays
caaacagattcacgtcagattt

SEQ ID NO: 282 - protein, 350 aa, artificial sequence
  MHP14
MNTKYNKEFLLYLAGFVDGDGSIIAQIKPNQSYKFKHQLMLTFTVTQKTQRRWFLDKLVDEIGVGYVRDRGSVSDYILSQIKPLHNFLTQLQPFLKLKQKQANLVLKIIEQLPSAKESPDKFLEVCTWVDQIAALNDSKTRKTTSETVRAVLDSLPGSVGGLSPSQASSAASSASSSPGSGISEALRAGATKSKEFLLYLAGFVDGDGSIIAAIKPNQSYKFKHQLSLTFTVTQKTQRRWFLDKLVDEIGVGYVRDQGSVSHYQLSQIKPLHNFLTQLQPFLKLKQKQANLVLKIIEQLPSAKESPDKFLEVCTWVDQIAALNDSKTRKTTSETVRAVLDSLSEKKKSSP

SEQ ID NO: 283 - protein, 350 aa, artificial sequence
  MHP14+
MNTKYNKEFLLYLAGFVDSDGSIIAQIKPNQSYKFKHQLMLTFTVTQKTQRRWFLLKLVDEIGVGKVRDRGSVSDYILSQIKPLHNFLTQLQPFLKLKQKQAVLVLKIIEQLPSAKESPDGFLEVCTWVDQVAALNDSKTRKTTSETVRAVLMSLPGSVGGLSPSQASSAASSASSSPGSGISEALRAGATKSKEFLLYLAGFVDGDGSIIAAIKPNQSYKFKHQLSLTFTVTQKTQRRWFLDKLVDEIGVGYVRDQGSVSHYQLSQIKPLHNFLTQLQPFLKLKQKQANLVLKIIEQLPSAKESPDGFLEVCTWADQVAALNDSKTRKTTSETVRAVLDSLSEKKKSSP

SEQ ID NO: 284 - protein, 350 aa, artificial sequence
  MHP14(01)
MNTKYNKEFLLYLAGFVDSDGCIIAQIKPNQSYKFKHQLMLTFTVTQKTQRRWFLLKLVDEIGVGYVRDRGSVSDYILSQKKPLHNFLTQLQPFLKLKQKQAVLVLKIIEQLPSAKESPDGFLEVCTWVDQVAALNDSKTRKTTSETVRAVLDSLPGSVGGLSPSQASSAASSASSSPGSGISEALRAGATKSKEFLLYLAGFVDGDGSIIAAIKPNQSYKFKHQLSLTFTVTQKTQRRWFLDKLVDEIGVGYVRDQGSVSHYQLSQIKPLHNFLTQLQPYLKLKQKQANLVLKIIEQLPSAKESPDGFLEVCTWVDQVAALNDSKTRKTTSETVRAVLDSLSEKKKSSP

SEQ ID NO: 285 - protein, 350 aa, artificial sequence
  MHP14(02)
MNTKYNKEFLLYLAGIVDSDGCIIAQIKPNQSYKFKHQLMLTFTVTQKTQRRWILDKLHDEIGVGYVRDRGSVSDYILSQIKPLHNFLTQLQPFLKLKQKQAVLVLKIIEQLPSAKESPDKFLEVCTWVDQIAALNDSKTRKTTSETVRAVLMSLPGSVGGLSPSQASSAASSASSSPGSGISEALRAGATKSKEFLLYLAGFVDGDGSIIAAIKPNQSYKFKHQLSLTFTVTQKTQRRWFLDELVDEIGVGYVRDQGSVSHYQLSQIKPLHNFLTQLQPYLKLKQKQANLVLKIIEQLPSAKESPDKFLEVCTWVDQIAALNDSKTRKTTSETVRAVLDSLSEKKKSSP

SEQ ID NO: 286 - protein, 350 aa, artificial sequence
  MHP14(03)
MNTKYNKEFLLYLAGFVDSDGCIIAQIKPNQSYKFKHQLMLTFTVTQKTQRRWILLKLHDEIGVGYVRDRGSVSDYILSQIKPLHNFLTQLQPFLKLKQKQAVLVLKIIEQLPSAKESPDGFLEVCTWVDQVAALNDSKTRKTTSETVRAVLDSLPGSVGGLSPSQASSAASSASSSPGSGISEALRAGATKSKEFLLYLAGFVDGDGSIIAAIKPNQSYKFKHQLSLTFTVTQKTQRRWFLDELVDEIGVGYVRDQGSVSHYQLSQIKPLHNFLTQLQPYLKLKQKQANLVLKIIEQLPSAKESPDGFLEVCTWADQVAALNDSKTRKTTSETVRAVLDSLSEKKKSSP

SEQ ID NO: 287 - protein, 350 aa, artificial sequence
  MHP14(04)
MNTKYNKEFLLYLAGFVDSDGSIIAQIKPNQSYKFKHQLMLTFTVTQKTQRRWFLLKLVDEIGVGYVRDRGSVSDYILSQIKPLHNFLTQLQPFLKLKQKQAVLVLKIIEQLPSAKESPDGFLEVCTWVDQVAALNDSKTRKTTSETVRAVLMSLPGSVGGLSPSQASSAASSASSSPGSGISEALRAGATKSKEFLLYLAGFVDGDGSIIAAIKPNQSYKFKHQLSLTFTVTQKTQRRWFLDKLVDEIGVGYVRDQGSVSHYQLSQIKPLHNFLTQLQPFLKLKQKQANLVLKIIEQLPSAKESPDGFLEVCTWADQVAALNDSKTRKTTSETVRAVLDSLSEKKKSSP

SEQ ID NO: 288 - protein, 350 aa, artificial sequence
  MHP14(06)
MNTKYNKEFLLYLAGFVDGDGSIIAQIKPNQSYKFKHQLMLTFTVTQKTRRRWFLLKLVDEIGVGYVRDRGSVSDYILSQKKPLHNFLTQLQPFLKLKQKQANLVLKIIEQLPSAKESPDGFLEVCTWVDQIAALNDSKTRKTTSETVRAVLDSLPGSVGGLSPSQASSAASSASSSPGSGISEALRAGATKSKEFLLYLAGFVDGDGSIIAAIKPNQSYKFKHQLSLTFTVTQKTQRRWFLDELVDEIGVGYVRDQGSVSHYQLSQIKPLHNFLTQLQPYLKLKQKQANLVLKIIEQLPSAKESPDKFLEVCTWVDQVAALNDSKTRKTTSETVRAVLDSLSEKKKSSP

SEQ ID NO: 289 - protein, 350 aa, artificial sequence
  MHP14(07)
MNTKYNKEFLLYLAGFVDGDGCIIAQIKPNQSYKFKHQLMLTFTVTQKTRRRWILLKLHDEIGVGYVRDRGSVSDYILSQIKPLHNFLTQLQPFLKLKQKQAVLVLKIIEQLPSAKESPDKFLEVCTWVDQVAALNDSKTRKTTSETVRAVLDSLPGSVGGLSPSQASSAASSASSSPGSGISEALRAGATKSKEFLLYLAGFVDGDGSIIAAIKPNQSYKFKHQLSLTFTVTQKTQRRWFLDKLVDEIGVGYVRDQGSVSHYQLSQIKPLHNFLTQLQPYLKLKQKQANLVLKIIEQLPSAKESPDKFLEVCTWVDQIAALNDSKTRKTTSETVRAVLDSLSEKKKSSP

SEQ ID NO: 290 - protein, 350 aa, artificial sequence
  290 MHP14(08)
MNTKYNKEFLLYLAGFVDGDGCIIAQIKPNQSYKFKHQLMLTFTVTQKTKRRWILLKLVDEIGVGYVRDRGSVSDYILSQIKPLHNFLTQLQPFLKLKQKQANLVLKIIEQLPSAKESPDKFLEVCTWVDQIAALNDSKTRKTTSETVRAVLDSLPGSVGGLSPSQASSAASSASSSPGSGISEALRAGATKSKEFLLYLAGFVDGDGSIIAAIKPNQSYKFKHQLSLTFTVTQKTQRRWFLDKLVDEIGVGYVRDQGSVSHYQLSQIKPLHNFLTQLQPFLKLKQKQANLVLKIIEQLPSAKESPDKFLEVCTWADQIAALNDSKTRKTTSETVRAVLDSLSEKKKSSP

SEQ ID NO: 291 - protein, 350 aa, artificial sequence
  MHP14(09)
MNTKYNKEFLLYLAGFVDSDGCIIAQIKPNQSYKFKHQLMLTFTVTQKTRRRWILLKLVDEIGVGYVRDRGSVSDYILSQIKPLHNFLTQLQPFLKLKQKQAVLVLKIIEQLPSAKESPDGFLEVCTWVDQVAALNDSKTRKTTSETVRAVLMSLPGSVGGLSPSQASSAASSASSSPGSGISEALRAGATKSKEFLLYLAGFVDGDGSIIAAIKPNQSYKFKHQLSLTFTVTQKTQRRWFLDELVDEIGVGYVRDQGSVSHYQLSQIKPLHNFLTQLQPFLKLKQKQANLVLKIIEQLPSAKESPDGFLEVCTWVDQIAALNDSKTRKTTSETVRAVLDSLSEKKKSSP

SEQ ID NO: 292 - protein, 349 aa, artificial sequence
  MHP14(10)
MNTKYNKEFLLYLAGIVDGDGCIIAQIKPNQSYKFKHQLMLTFTVTQKTKRRWFLLKLVDEIGVGYVRDRGSVSDYILSQKKPLHNFLTQLQPFLKLKQKQAVLVLKIIEQLPSAKESPDKFLEVCTWVDQVAALNDSKTRKTTSETVRAVLLSLPGSVEVYRHLRHPAPHPRLPQARVQGSPKHSELEPKSKEFLLYLAGFVDGDGSIIAAIKPNQSYKFKHQLSLTFTVTQKTQRRWFLDELVDEIGVGYVRDQGSVSHYQLSQIKPLHNFLTQLQPFLKLKQKQANLVLKIIEQLPSAKESPDKFLEVCTWVDQVAALNDSKTRKTTSETVRAVLDSLSEKKKSSP

SEQ ID NO: 293 - protein, 350 aa, artificial sequence
  MHP14(12)
MNTKYNKEFLLYLAGIVDGDGSIIAQIKPNQSYKFKHQLMLTFTVTQKTKRRWFLDKLVDEIGVGYVRDRGSVSDYILSQIKPLHNFLTQLQPFLKLKQKQAVLVLKIIEQLPSAKESPDKFLEVCTWVDQVAALNDSKTRKTTSETVRAVLMSLPGSVGGLSPSQASSAASSASSSPGSGISEALRAGATKSKEFLLYLAGFVDGDGSIIAAIKPNQSYKFKHQLSLTFTVTQKTQRRWFLDELVDEIGVGYVRDQGSVSHYQLSQIKPLHNFLTQLQPYLKLKQKQANLVLKIIEQLPSAKESPDKFLEVCTWVDQIAALNDSKTRKTTSETVRAVLDSLSEKKKSSP

SEQ ID NO: 294 - protein, 350 aa, artificial sequence
  MHP14(13)
MNTKYNKEFLLYLAGFVDGDGCIIAQIKPNQSYKFKHQLMLTFTVTQKTKRRWILDKLVDEIGVGYVRDRGSVSDYILSQIKPLHNFLTQLQPFLKLKQKQANLVLKIIEQLPSAKESPDGFLEVCTWVDQVAALNDSKTRKTTSETVRAVLLSLPGSVGGLSPSQASSAASSASSSPGSGISEALRAGATKSKEFLLYLAGFVDGDGSIIAAIKPNQSYKFKHQLSLTFTVTQKTQRRWFLDELVDEIGVGYVRDQGSVSHYQLSQIKPLHNFLTQLQPYLKLKQKQANLVLKIIEQLPSAKESPDGFLEACTWVDQIAALNDSKTRKTTSETVRAVLDSLSEKKKSSP

SEQ ID NO: 295 - protein, 350 aa, artificial sequence
  MHP14(14)
MNTKYNKEFLLYLAGFVDGDGSIIAQIKPNQSYKFKHQLMLTFTVTQKTRRRWFLDKLVDEIGVGYVRDRGSVSDYILSQIKPLHNFLTQLQPFLKLKQKQANLVLKIIEQLPSAKESPDKFLEVCTWVDQIAALNDSKTRKTTSETVRAVLDSLPGSVGGLSPSQASSAASSASSSPGSGISEALRAGATKSKEFLLYLAGFVDGDGSIIAAIKPNQSYKFKHQLSLTFTVTQKTQRRWFLDKLVDEIGVGYVRDQSSVSHYQLSQIKPLHNFLTQLQPFLKLKQKQANLVLKIIEQLPSAKESPDGFLEVCTWADQIAALNDSKTRKTTSETVRAVLDSLSEKKKSSP

SEQ ID NO: 296 - protein, 350 aa, artificial sequence
  MHP14(L14-03)
MNTKYNKEFLLYLAGFVDGDGSIIAQIKPNQSYKFKHQLMLTFTVTQKTQRRWFLDKLVDEVGVGYVRDRGSVSDYILSQIKPLHNFLTQLQPFLKLRQKQANLALKIIEQLPSARETPDKFLEVCTWVDQIAALNDSKTRKTTSETVRAVLDSLPGSVGGLSPSQASSAASSASSSPGSGISEALRAGATKSKEFLLYLAGFVDGDGSIIAAIKPNQSYKFKHQLSLTFTVTQKTQRRWFLDKLVDEIGVGYVRDQGSVSHYQLSQIKPLHNFLTQLQPFLKLKQKQANLVLKIIEQLPSAKESPDKFLEVCTWVDQIAALNDSKTRKTTSETVRAVLDSLSEKKKSSP

SEQ ID NO: 297 - protein, 350 aa, artificial sequence
  MHP14(L14-04)
MNTKYNKEFLLYLAGFVDGDGSIIAQIKPNRSYKFKHQLMLTFTVTQKTQRRWFLDKLVDEIGVGYVRDRGSVSDYILSQIKPLHNFLTQLQPFLKLKQKQANLVLKIIEQLPSAKESPDKFLEVCTWVDQIAALNDSKTRKTTSETVRAVLDSLPGSVGGLSPSQASSAASSASSSPGSGISEALRAGATKSKEFLLYLAGFVDGDGSIIAAIKPNQSYKFKHQLSLTFTVTQKTQRRWFLDKLVDEIGVGYVRDQGSVSHYQLSQIKPLHNFLTQLQPFLKLKQKQANLVLKIIEQLPSAKESPDKFLEVCTWVDQIAALNDSKTRKTTSETVRAVLDSLSEKKKSSP

SEQ ID NO: 298 - protein, 350 aa, artificial sequence
  MHP14(L14-07)
MNTKYNKEFLLHLAGFVDGDGSIIAQIKPNQSYKFKHQLMLTFTVTQKTQRRWFLDKLVDEIGVGYVRDRGSVSDYILSQIKPLHNFLTQLQPFLKLKQKQANLVLKIIEQLPSAKESPDKFLEVCTWVDQTAALNDSKTRKTTSETVRAVLDSLPGSVGGLSPSQASSAASSASSSPGSGISEALRAGATKSKEFLLYLAGFVDGDGSIIAAIKPNQSYKFKHQLSLTFTVTQKTQRRWFLDKLVDEIGVGYVRDQGSVSHYQLSQIKPLHNFLTQLQPFLKLKQKQANLVLKIIEQLPSAKESPDKFLEVCTWVDQIAALNDSKTRKTTSETVRAVLDSLSEKKKSSP

SEQ ID NO: 299 - DNA, 1050 bp, artificial sequence
  MHP14 yeast
atgaacaccaagtacaacaaggagttcctgctctacctggccggcttcgtggacggcgacggctccatcatagcgcagatcaagccgaaccagtcctacaagttcaagcaccagctcatgctgaccttcacggtgacccagaagacgcagaggcgctggttcctcgacaagctggtcgacgagatcggggtgggctacgtccgtgaccgcgggtcggtgtccgactacatactctcccagatcaagcccctgcacaacttcctcacccagctccagccgttcctcaagctgaagcagaagcaggcgaacctcgtcctgaagatcatcgagcagctcccctcggccaaggagtccccggacaagttcctggaggtgtgcacgtgggtcgaccagatcgcggccctcaacgacagcaagacccgcaagacgacctcggagacggtgcgggcggtcctggactccctcccaggatccgtgggaggtctatcgccatctcaggcatccagcgccgcatcctcggcttcctcaagcccgggttcagggatctccgaagcactcagagctggagcaactaagtccaaagagtttttattatatttagcggggtttgtcgatggggatgggagtataatagccgctataaaacccaatcaatcttataaatttaaacatcaattaagtttaacatttacggtcacgcaaaaaacccaacgtaggtggtttttagataaattagtggatgaaataggcgtcgggtatgtgcgtgatcagggcagcgtcagtcattatcagttaagtcaaataaaaccgttacataattttttaacgcaattacaaccctttttaaaattaaaacaaaaacaagccaatttagtgttaaaaataatagaacaattaccgagcgcgaaagaaagtcccgataaatttttagaagtctgtacctgggtggatcaaatagccgcgttaaatgattcaaaaacgaggaaaaccacgagcgaaaccgtcagagccgtgttagatagtttatcagaaaagaagaaaagcagtccg

SEQ ID NO: 300 - DNA, 1050 bp, artificial sequence
  MHP14(01)
atgaacaccaagtacaacaaggagttcctgctctacctggccggctttgtggacagcgacggctgcatcatagcgcagatcaagccgaaccagtcctacaagttcaagcaccagctcatgctgaccttcacggtgacccagaagacgcagaggcgctggtttctcctaaagctggtagacgagatcggggtgggctacgtccgtgaccgcgggtcggtgtccgactacatactctcccagaaaaagcccctgcacaacttcctcacccagctccagccgttcctcaagctgaagcagaagcaggcggtcctcgtcctgaagatcatcgagcagctcccctcggccaaggagtccccggacggattcctggaggtgtgcacgtgggtcgaccaggttgcggccctcaacgacagcaagacccgcaagacgacctcggagacggtgcgggcggtcctggactccctcccaggatccgtgggaggtctatcgccatctcaggcatccagcgccgcatcctcggcttcctcaagcccgggttcagggatctccgaagcactcagagctggagcaactaagtccaaagagtttttattatatttagcggggtttgtcgatggggatgggagtataatagccgctataaaacccaatcaatcttataaatttaaacatcaattaagtttaacatttacggtcacgcaaaaaacccaacgtaggtggtttttagataagttagtggatgaaataggcgtcgggtatgtacgtgatcagggcagcgtcagtcattatcagttaagtcaaataaaaccgttacataattttttaacgcaattacaaccctacttaaaattaaaacaaaaacaagccaatttagtgttaaaaataatagaacaattaccgagcgcgaaagaaagtcccgatggatttttagaagtctgtacctgggtggatcaagttgccgcgttaaatgattcaaaaacgaggaaaaccacgagcgaaaccgtcagagccgtgttagatagtttatcagaaaagaagaaaagcagtccg

SEQ ID NO: 301 - DNA, 1050 bp, artificial sequence
  MHP14(02)
atgaacaccaagtacaacaaggagttcctgctctacctggccggcattgtggacagcgacggctgcatcatagcgcagatcaagccgaaccagtcctacaagttcaagcaccagctcatgctgaccttcacggtgacccagaagacgcagaggcgctggattctcgataagctgcacgacgagatcggggtgggctacgtccgtgaccgcgggtcggtgtccgactacatactctcccagataaagcccctgcacaacttcctcacccagctccagccgttcctcaagctgaagcagaagcaggcggtcctcgtcctgaagatcatcgagcagctcccctcggccaaggagtccccggacaagttcctggaggtgtgcacgtgggtcgaccagattgcggccctcaacgacagcaagacccgcaagacgacctcggagacggtgcgggcggtcctgatgtccctcccaggatccgtgggaggtctatcgccatctcaggcatccagcgccgcatcctcggcttcctcaagcccgggttcagggatctccgaagcactcagagctggagcaactaagtccaaagagtttttattatatttagcggggtttgtcgatggggatgggagtataatagccgctataaaacccaatcaatcttataaatttaaacatcaattaagtttaacatttacggtcacgcaaaaaacccaacgtaggtggtttttagatgagttagtggatgaaataggcgtcgggtatgtacgtgatcagggcagcgtcagtcattatcagttaagtcaaataaaaccgttacataattttttaacgcaattacaaccctacttaaaattaaaacaaaaacaagccaatttagtgttaaaaataatagaacaattaccgagcgcgaaagaaagtcccgataagtttttagaagtctgtacctgggtggatcaaattgccgcgttaaatgattcaaaaacgaggaaaaccacgagcgaaaccgtcagagccgtgttagatagtttatcagaaaagaagaaaagcagtccg

SEQ ID NO: 302 - DNA, 1050 bp, artificial sequence
  MHP14(03
atgaacaccaagtacaacaaggagttcctgctctacctggccggctttgtggacagcgacggctgcatcatagcgcagatcaagccgaaccagtcctacaagttcaagcaccagctcatgctgaccttcacggtgacccagaagacgcagaggcgctggattctcctaaagctgcacgacgagatcggggtgggctacgtccgtgaccgcgggtcggtgtccgactacatactctcccagataaagcccctgcacaacttcctcacccagctccagccgttcctcaagctgaagcagaagcaggcggtcctcgtcctgaagatcatcgagcagctcccctcggccaaggagtccccggacggattcctggaggtgtgcacgtgggtcgaccaggttgcggccctcaacgacagcaagacccgcaagacgacctcggagacggtgcgggcggtcctggactccctcccaggatccgtgggaggtctatcgccatctcaggcatccagcgccgcatcctcggcttcctcaagcccgggttcagggatctccgaagcactcagagctggagcaactaagtccaaagagtttttattatatttagcggggtttgtcgatggggatgggagtataatagccgctataaaacccaatcaatcttataaatttaaacatcaattaagtttaacatttacggtcacgcaaaaaacccaacgtaggtggtttttagatgagttagtggatgaaataggcgtcgggtatgtacgtgatcagggcagcgtcagtcattatcagttaagtcaaataaaaccgttacataattttttaacgcaattacaaccctacttaaaattaaaacaaaaacaagccaatttagtgttaaaaataatagaacaattaccgagcgcgaaagaaagtcccgatggatttttagaagtctgtacctgggcggatcaagttgccgcgttaaatgattcaaaaacgaggaaaaccacgagcgaaaccgtcagagccgtgttagatagtttatcagaaaagaagaaaagcagtccg

SEQ ID NO: 303 - DNA, 1050 bp, artificial sequence
  MHP14(04)
atgaacaccaagtacaacaaggagttcctgctctacctggccggctttgtggacagcgacggcagcatcatagcgcagatcaagccgaaccagtcctacaagttcaagcaccagctcatgctgaccttcacggtgacccagaagacgcagaggcgctggtttctcctaaagctggtagacgagatcggggtgggctacgtccgtgaccgcgggtcggtgtccgactacatactctcccagataaagcccctgcacaacttcctcacccagctccagccgttcctcaagctgaagcagaagcaggcggtcctcgtcctgaagatcatcgagcagctcccctcggccaaggagtccccggacggattcctggaggtgtgcacgtgggtcgaccaggttgcggccctcaacgacagcaagacccgcaagacgacctcggagacggtgcgggcggtcctgatgtccctcccaggatccgtgggaggtctatcgccatctcaggcatccagcgccgcatcctcggcttcctcaagcccgggttcagggatctccgaagcactcagagctggagcaactaagtccaaagagtttttattatatttagcggggtttgtcgatggggatgggagtataatagccgctataaaacccaatcaatcttataaatttaaacatcaattaagtttaacatttacggtcacgcaaaaaacccaacgtaggtggtttttagataagttagtggatgaaataggcgtcgggtatgtacgtgatcagggcagcgtcagtcattatcagttaagtcaaataaaaccgttacataattttttaacgcaattacaacccttcttaaaattaaaacaaaaacaagccaatttagtgttaaaaataatagaacaattaccgagcgcgaaagaaagtcccgatggatttttagaagtctgtacctgggcggatcaagttgccgcgttaaatgattcaaaaacgaggaaaaccacgagcgaaaccgtcagagccgtgttagatagtttatcagaaaagaagaaaagcagtccg

SEQ ID NO: 304 - DNA, 1050 bp, artificial sequence
  MHP14(06)
atgaacaccaagtacaacaaggagttcctgctctacctggccggctttgtggacggcgacggcagcatcatagcgcagatcaagccgaaccagtcctacaagttcaagcaccagctcatgctgaccttcacggtgacccagaagacgcgtaggcgctggtttctcctaaagctggtagacgagatcggggtgggctacgtccgtgaccgcgggtcggtgtccgactacatactctcccagaaaaagcccctgcacaacttcctcacccagctccagccgttcctcaagctgaagcagaagcaggcgaatctcgtcctgaagatcatcgagcagctcccctcggccaaggagtccccggacggattcctggaggtgtgcacgtgggtcgaccagattgcggccctcaacgacagcaagacccgcaagacgacctcggagacggtgcgggcggtcctggactccctcccaggatccgtgggaggtctatcgccatctcaggcatccagcgccgcatcctcggcttcctcaagcccgggttcagggatctccgaagcactcagagctggagcaactaagtccaaagagtttttattatatttagcggggtttgtcgatggggatgggagtataatagccgctataaaacccaatcaatcttataaatttaaacatcaattaagtttaacatttacggtcacgcaaaaaacccaacgtaggtggtttttagatgagttagtggatgaaataggcgtcgggtatgtacgtgatcagggcagcgtcagtcattatcagttaagtcaaataaaaccgttacataattttttaacgcaattacaaccctacttaaaattaaaacaaaaacaagccaatttagtgttaaaaataatagaacaattaccgagcgcgaaagaaagtcccgataagtttttagaagtctgtacctgggtggatcaagttgccgcgttaaatgattcaaaaacgaggaaaaccacgagcgaaaccgtcagagccgtgttagatagtttatcagaaaagaagaaaagcagtccg

SEQ ID NO: 305 - DNA, 1050 bp, artificial sequence
  MHP14(07)
atgaacaccaagtacaacaaggagttcctgctctacctggccggctttgtggacggcgacggctgcatcatagcgcagatcaagccgaaccagtcctacaagttcaagcaccagctcatgctgaccttcacggtgacccagaagacgcgtaggcgctggattctcctaaagctgcacgacgagatcggggtgggctacgtccgtgaccgcgggtcggtgtccgactacatactctcccagataaagcccctgcacaacttcctcacccagctccagccgttcctcaagctgaagcagaagcaggcggtcctcgtcctgaagatcatcgagcagctcccctcggccaaggagtccccggacaagttcctggaggtgtgcacgtgggtcgaccaggttgcggccctcaacgacagcaagacccgcaagacgacctcggagacggtgcgggcggtcctggactccctcccaggatccgtgggaggtctatcgccatctcaggcatccagcgccgcatcctcggcttcctcaagcccgggttcagggatctccgaagcactcagagctggagcaactaagtccaaagagtttttattatatttagcggggtttgtcgatggggatgggagtataatagccgctataaaacccaatcaatcttataaatttaaacatcaattaagtttaacatttacggtcacgcaaaaaacccaacgtaggtggtttttagataagttagtggatgaaataggcgtcgggtatgtacgtgatcagggcagcgtcagtcattatcagttaagtcaaataaaaccgttacataattttttaacgcaattacaaccctacttaaaattaaaacaaaaacaagccaatttagtgttaaaaataatagaacaattaccgagcgcgaaagaaagtcccgataagtttttagaagtctgtacctgggtggatcaaattgccgcgttaaatgattcaaaaacgaggaaaaccacgagcgaaaccgtcagagccgtgttagatagtttatcagaaaagaagaaaagcagtccg

SEQ ID NO: 306 - DNA, 1050 bp, artificial sequence
  MHP14(08)
atgaacaccaagtacaacaaggagttcctgctctacctggccggctttgtggacggcgacggctgcatcatagcgcagatcaagccgaaccagtcctacaagttcaagcaccagctcatgctgaccttcacggtgacccagaagacgaagaggcgctggattctcctaaagctggtagacgagatcggggtgggctacgtccgtgaccgcgggtcggtgtccgactacatactctcccagataaagcccctgcacaacttcctcacccagctccagccgttcctcaagctgaagcagaagcaggcgaatctcgtcctgaagatcatcgagcagctcccctcggccaaggagtccccggacaagttcctggaggtgtgcacgtgggtcgaccagattgcggccctcaacgacagcaagacccgcaagacgacctcggagacggtgcgggcggtcctggactccctcccaggatccgtgggaggtctatcgccatctcaggcatccagcgccgcatcctcggcttcctcaagcccgggttcagggatctctgaagcactcagagctggagcaactaagtccaaagagtttttattatatttagcggggtttgtcgatggggatgggagtataatagccgctataaaacccaatcaatcttataaatttaaacatcaattaagtttaacatttacggtcacgcaaaaaacccaacgtaggtggtttttagataagttagtggatgaaataggcgtcgggtatgtacgtgatcagggcagcgtcagtcattatcagttaagtcaaataaaaccgttacataattttttaacgcaattacaacccttcttaaaattaaaacaaaaacaagccaatttagtgttaaaaataatagaacaattaccgagcgcgaaagaaagtcccgataagtttttagaagtctgtacctgggcggatcaaattgccgcgttaaatgattcaaaaacgaggaaaaccacgagcgaaaccgtcagagccgtgttagatagtttatcagaaaagaagaaaagcagtccg

SEQ ID NO: 307 - DNA, 1050 bp, artificial sequence
  MHP14(09)
atgaacaccaagtacaacaaggagttcctgctctacctggccggctttgtggacagcgacggctgcatcatagcgcagatcaagccgaaccagtcctacaagttcaagcaccagctcatgctgaccttcacggtgacccagaagacgcgtaggcgctggattctcctaaagctggtagacgagatcggggtgggctacgtccgtgaccgcgggtcggtgtccgactacatactctcccagataaagcccctgcacaacttcctcacccagctccagccgttcctcaagctgaagcagaagcaggcggtcctcgtcctgaagatcatcgagcagctcccctcggccaaggagtccccggacggattcctggaggtgtgcacgtgggtcgaccaggttgcggccctcaacgacagcaagacccgcaagacgacctcggagacggtgcgggcggtcctgatgtccctcccaggatccgtgggaggtctatcgccatctcaggcatccagcgccgcatcctcggcttcctcaagcccgggttcagggatctccgaagcactcagagctggagcaactaagtccaaagagtttttattatatttagcggggtttgtcgatggggatgggagtataatagccgctataaaacccaatcaatcttataaatttaaacatcaattaagtttaacatttacggtcacgcaaaaaacccaacgtaggtggtttttagatgagttagtggatgaaataggcgtcgggtatgtacgtgatcagggcagcgtcagtcattatcagttaagtcaaataaaaccgttacataattttttaacgcaattacaacccttcttaaaattaaaacaaaaacaagccaatttagtgttaaaaataatagaacaattaccgagcgcgaaagaaagtcccgatggatttttagaagtctgtacctgggtggatcaaattgccgcgttaaatgattcaaaaacgaggaaaaccacgagcgaaaccgtcagagccgtgttagatagtttatcagaaaagaagaaaagcagtccg

SEQ ID NO: 308 - DNA, 1047 bp, artificial sequence
  MHP14(10)
atgaacaccaagtacaacaaggagttcctgctctacctggccggcattgtggacggcgacggctgcatcatagcgcagatcaagccgaaccagtcctacaagttcaagcaccagctcatgctgaccttcacggtgacccagaagacgaagaggcgctggtttctcctaaagctggtagacgagatcggggtgggctacgtccgtgaccgcgggtcggtgtccgactacatactctcccagaaaaagcccctgcacaacttcctcacccagctccagccgttcctcaagctgaagcagaagcaggcggtcctcgtcctgaagatcatcgagcagctcccctcggccaaggagtccccggacaagttcctggaggtgtgcacgtgggtcgaccaggttgcggccctcaacgacagcaagacccgcaagacgacctcggagacggtgcgggcggtcctgttgtccctcccaggatccgtggaggtctatcgccatctcaggcatccagcgccgcatcctcggcttcctcaagcccgggttcagggatctccgaagcactcagagctggagcctaagtccaaagagtttttattatatttagcggggtttgtcgatggggatgggagtataatagccgctataaaacccaatcaatcttataaatttaaacatcaattaagtttaacatttacggtcacgcaaaaaacccaacgtaggtggtttttagatgagttagtggatgaaataggcgtcgggtatgtacgtgatcagggcagcgtcagtcattatcagttaagtcaaataaaaccgttacataattttttaacgcaattacaacccttcttaaaattaaaacaaaaacaagccaatttagtgttaaaaataatagaacaattaccgagcgcgaaagaaagtcccgataagtttttagaagtctgtacctgggtggatcaagttgccgcgttaaatgattcaaaaacgaggaaaaccacgagcgaaaccgtcagagccgtgttagatagtttatcagaaaagaagaaaagcagtccg

SEQ ID NO: 309 - DNA, 1050 bp, artificial sequence
  MHP14(12)
atgaacaccaagtacaacaaggagttcctgctctacctggccggcattgtggacggcgacggcagcatcatagcgcagatcaagccgaaccagtcctacaagttcaagcaccagctcatgctgaccttcacggtgacccagaagacgaagaggcgctggtttctcgataagctggtagacgagatcggggtgggctacgtccgtgaccgcgggtcggtgtccgactacatactctcccagataaagcccctgcacaacttcctcacccagctccagccgttcctcaagctgaagcagaagcaggcggtcctcgtcctgaagatcatcgagcagctcccctcggccaaggagtccccggacaagttcctggaggtgtgcacgtgggtcgaccaggttgcggccctcaacgacagcaagacccgcaagacgacctcggagacggtgcgggcggtcctgatgtccctcccaggatccgtgggaggtctatcgccatctcaggcatccagcgccgcatcctcggcttcctcaagcccgggttcagggatctccgaagcactcagagctggagcaactaagtccaaagagtttttattatatttagcggggtttgtcgatggggatgggagtataatagccgctataaaacccaatcaatcttataaatttaaacatcaattaagtttaacatttacggtcacgcaaaaaacccaacgtaggtggtttttagatgagttagtggatgaaataggcgtcgggtatgtacgtgatcagggcagcgtcagtcattatcagttaagtcaaataaaaccgttacataattttttaacgcaattacaaccctacttaaaattaaaacaaaaacaagccaatttagtgttaaaaataatagaacaattaccgagcgcgaaagaaagtcccgataagtttttagaagtctgtacctgggtggatcaaattgccgcgttaaatgattcaaaaacgaggaaaaccacgagcgaaaccgtcagagccgtgttagatagtttatcagaaaagaagaaaagcagtccg

SEQ ID NO: 310 - DNA, 1050 bp, artificial sequence
  MHP14(13)
atgaacaccaagtacaacaaggagttcctgctctacctggccggctttgtggacggcgacggctgcatcatagcgcagatcaagccgaaccagtcctacaagttcaagcaccagctcatgctgaccttcacggtgacccagaagacgaagaggcgctggattctcgataagctggtagacgagatcggggtgggctacgtccgtgaccgcgggtcggtgtccgactacatactctcccagataaagcccctgcacaacttcctcacccagctccagccgttcctcaagctgaagcagaagcaggcgaatctcgtcctgaagatcatcgagcagctcccctcggccaaggagtccccggacggattcctggaggtgtgcacgtgggtcgaccaggttgcggccctcaacgacagcaagacccgcaagacgacctcggagacggtgcgggcggtcctgttgtccctcccaggatccgtgggaggtctatcgccatctcaggcatccagcgccgcatcctcggcttcctcaagcccgggttcagggatctccgaagcactcagagctggagcaactaagtccaaagagtttttattatatttagcggggtttgtcgatggggatgggagtataatagccgctataaaacccaatcaatcttataaatttaaacatcaattaagtttaacatttacggtcacgcaaaaaacccaacgtaggtggtttttagatgagttagtggatgaaataggcgtcgggtatgtacgtgatcagggcagcgtcagtcattatcagttaagtcaaataaaaccgttacataattttttaacgcaattacaaccctacttaaaattaaaacaaaaacaagccaatttagtgttaaaaataatagaacaattaccgagcgcgaaagaaagtcccgatggatttttagaagcctgtacctgggtggatcaaattgccgcgttaaatgattcaaaaacgaggaaaaccacgagcgaaaccgtcagagccgtgttagatagtttatcagaaaagaagaaaagcagtccg

SEQ ID NO: 311 - DNA, 1050 bp, artificial sequence
  MHP14(14)
atgaacaccaagtacaacaaggagttcctgctctacctggccggctttgtggacggcgacggcagcatcatagcgcagatcaagccgaaccagtcctacaagttcaagcaccagctcatgctgaccttcacggtgacccagaagacgcgtaggcgctggtttctcgataagctggtagacgagatcggggtgggctacgtccgtgaccgcgggtcggtgtccgactacatactctcccagataaagcccctgcacaacttcctcacccagctccagccgttcctcaagctgaagcagaagcaggcgaatctcgtcctgaagatcatcgagcagctcccctcggccaaggagtccccggacaagttcctggaggtgtgcacgtgggtcgaccagattgcggccctcaacgacagcaagacccgcaagacgacctcggagacggtgcgggcggtcctggactccctcccaggatccgtgggaggtctatcgccatctcaggcatccagcgccgcatcctcggcttcctcaagcccgggttcagggatctccgaagcactcagagctggagcaactaagtccaaagagtttttattatatttagcggggtttgtcgatggggatgggagtataatagccgctataaaacccaatcaatcttataaatttaaacatcaattaagtttaacatttacggtcacgcaaaaaacccaacgtaggtggtttttagataagttagtggatgaaataggcgtcgggtatgtacgtgatcagagcagcgtcagtcattatcagttaagtcaaataaaaccgttacataattttttaacgcaattacaacccttcttaaaattaaaacaaaaacaagccaatttagtgttaaaaataatagaacaattaccgagcgcgaaagaaagtcccgatggatttttagaagtctgtacctgggcggatcaaattgccgcgttaaatgattcaaaaacgaggaaaaccacgagcgaaaccgtcagagccgtgttagatagtttatcagaaaagaagaaaagcagtccg

SEQ ID NO: 312 - DNA, 1050 bp, artificial sequence
  MHP14(L14-03)
atgaacaccaagtacaacaaggagttcctgctctacctggccggcttcgtggacggcgacggctccatcatagcgcagatcaagccgaaccagtcctacaagttcaagcaccagctcatgctgaccttcacggtgacccagaagacgcagaggcgctggttcctcgacaagctggtcgacgaggttggggtgggctacgtccgtgaccgcgggtcggtgtccgactacatactctcccagatcaagcccctgcacaacttcctcacccagctccagccgttcctcaagctgaggcagaagcaggcgaacctcgccctgaagatcatcgagcagctcccctcggccagggagaccccggacaagttcctggaggtgtgcacgtgggtcgaccagatcgcggccctcaacgacagcaagacccgcaagacgacctcggagacggtgcgggcggtcctggactccctcccaggatccgtgggaggtctatcgccatctcaggcatccagcgccgcatcctcggcttcctcaagcccgggttcagggatctccgaagcactcagagctggagcaactaagtccaaagagtttttattatatctagcggggtttgtcgatggggatgggagtataatagccgctataaaacccaatcaatcttataaatttaaacatcaattaagtttaacatttacggtcacgcaaaaaacccaacgtaggtggtttttagataaattagtggatgaaataggcgtcgggtatgtgcgtgatcagggcagcgtcagtcattatcagttaagccaaataaaaccgttacataattttttaacgcaattacaaccctttttaaaattaaaacaaaaacaagccaatttagtgttaaaaataatagaacaattaccgagcgcgaaagaaagtcccgataaatttttagaagtctgtacctgggtggatcaaatagccgcgttaaatgattcaaaaacgaggaaaaccacgagcgaaaccgtcagagccgtgttagatagtttatcagaaaagaagaaaagcagtccg

SEQ ID NO: 313 - DNA, 1050 bp, artificial sequence
  MHP14(L14-04)
atgaacaccaagtacaacaaggagttcctgctctacctggccggcttcgtggacggcgacggctccatcatagcgcagatcaagccgaaccggtcctacaagttcaagcaccagctcatgctgaccttcacggtgacccagaagacgcagaggcgctggttcctcgacaagctggtcgacgagatcggggtgggctacgtccgtgaccgcgggtcggtgtccgactacatactctcccagatcaagcccctgcacaacttcctcacccagctccagccgttcctcaagctgaagcagaagcaggcgaacctcgtcctgaagatcatcgagcagctcccctcggccaaggagtccccggacaagttcctggaggtgtgcacgtgggtcgaccagatcgcggccctcaacgacagcaagacccgcaagacgacctcggagacggtgcgggcggtcctggactccctcccaggatccgtgggaggtctatcgccatctcaggcatccagcgccgcatcctcggcttcctcaagcccgggttcagggatctccgaagcactcagagctggagcaactaagtccaaagagtttttattatatttagcggggtttgtcgatggggatgggagtataatagccgctataaaacccaatcaatcttataaatttaaacatcaattaagtttaacatttacggtcacgcaaaaaacccaacgtaggtggtttttagataaattagtggatgaaataggcgtcgggtatgtgcgtgatcagggcagcgtcagtcattatcagttaagtcaaataaaaccgttacataattttttaacgcaattacaaccctttttaaaattaaaacaaaaacaagccaatttagtgttaaaaataatagaacaattaccgagcgcgaaagaaagtcccgataaatttttagaagtctgtacctgggtggatcaaatagccgcgttaaatgattcaaaaacgaggaaaaccacgagcgaaaccgtcagagccgtgttagatagtttatcagaaaagaagaaaagcagtccg

SEQ ID NO: 314 - DNA, 1050 bp, artificial sequence
  MHP14(L14-07)
atgaacaccaagtacaacaaggagttcctgctccacctggccggcttcgtggacggcgacggctccatcatagcgcagatcaagccgaaccagtcctacaagttcaagcaccagctcatgctgaccttcacggtgacccagaagacgcagaggcgctggttcctcgacaagctggtcgacgagatcggggtgggctacgtccgtgaccgcgggtcggtgtccgactacatactctcccagatcaagcccctgcacaacttcctcacccagctccagccgttcctcaagctgaagcagaagcaggcgaacctcgtcctgaagatcatcgagcagctcccctcggccaaggagtccccggacaagttcctggaggtgtgcacgtgggtcgaccagaccgcggccctcaacgacagcaagacccgcaagacgacctcggagacggtgcgggcggtcctggactccctcccgggatccgtgggaggtctatcgccatctcaggcatccagcgccgcatcctcggcttcctcaagcccgggttcagggatctccgaagcactcagagctggagcaactaagtccaaagagtttttattatatttagcggggtttgtcgatggggatgggagtataatagccgctataaaacccaatcaatcttataaatttaaacatcaattaagtttaacatttacggtcacgcaaaaaacccaacgtaggtggtttttagataaattagtggatgaaataggcgtcgggtatgtgcgtgatcagggcagcgtcagtcattatcagttaagtcaaataaaaccgttacataattttttaacgcaattacaaccctttttaaaattaaaacaaaaacaagccaatttagtgttaaaaataatagaacaattaccgagcgcgaaagaaagtcccgataaatttttagaagtctgtacctgggtggatcaaatagccgcgttaaatgattcaaaaacgaggaaaaccacgagcgaaaccgtcagagccgtgttagacagtttatcagaaaagaagaaaagcagtccg

SEQ ID NO: 315 - protein, 350 aa, artificial sequence; identical to SEQ ID NO: 283
  MHP14+(04)

SEQ ID NO: 316 - protein, 350 aa, artificial sequence
  MHP14+(06)
MNTKYNKEFLLYLAGFVDGDGSIIAQIKPNQSYKFKHQLMLTFTVTQKTRRRWFLLKLVDEIGVGKVRDRGSVSDYILSQKKPLHNFLTQLQPFLKLKQKQANLVLKIIEQLPSAKESPDGFLEVCTWVDQIAALNDSKTRKTTSETVRAVLDSLPGSVGGLSPSQASSAASSASSSPGSGISEALRAGATKSKEFLLYLAGFVDGDGSIIAAIKPNQSYKFKHQLSLTFTVTQKTQRRWFLDELVDEIGVGYVRDQGSVSHYQLSQIKPLHNFLTQLQPYLKLKQKQANLVLKIIEQLPSAKESPDKFLEVCTWVDQVAALNDSKTRKTTSETVRAVLDSLSEKKKSSP

SEQ ID NO: 317 - protein, 350 aa, artificial sequence
  MHP14+(08)
MNTKYNKEFLLYLAGFVDGDGCIIAQIKPNQSYKFKHQLMLTFTVTQKTKRRWILLKLVDEIGVGKVRDRGSVSDYILSQIKPLHNFLTQLQPFLKLKQKQANLVLKIIEQLPSAKESPDKFLEVCTWVDQIAALNDSKTRKTTSETVRAVLDSLPGSVGGLSPSQASSAASSASSSPGSGISEALRAGATKSKEFLLYLAGFVDGDGSIIAAIKPNQSYKFKHQLSLTFTVTQKTQRRWFLDKLVDEIGVGYVRDQGSVSHYQLSQIKPLHNFLTQLQPFLKLKQKQANLVLKIIEQLPSAKESPDKFLEVCTWADQIAALNDSKTRKTTSETVRAVLDSLSEKKKSSP

SEQ ID NO: 318 - protein, 350 aa, artificial sequence
  MHP14+(12)
MNTKYNKEFLLYLAGIVDGDGSIIAQIKPNQSYKFKHQLMLTFTVTQKTKRRWFLDKLVDEIGVGKVRDRGSVSDYILSQIKPLHNFLTQLQPFLKLKQKQAVLVLKIIEQLPSAKESPDKFLEVCTWVDQVAALNDSKTRKTTSETVRAVLMSLPGSVGGLSPSQASSAASSASSSPGSGISEALRAGATKSKEFLLYLAGFVDGDGSIIAAIKPNQSYKFKHQLSLTFTVTQKTQRRWFLDELVDEIGVGYVRDQGSVSHYQLSQIKPLHNFLTQLQPYLKLKQKQANLVLKIIEQLPSAKESPDKFLEVCTWVDQIAALNDSKTRKTTSETVRAVLDSLSEKKKSSP

SEQ ID NO: 319 - protein, 350 aa, artificial sequence
  MHP14+(14)
MNTKYNKEFLLYLAGFVDGDGSIIAQIKPNQSYKFKHQLMLTFTVTQKTRRRWFLDKLVDEIGVGKVRDRGSVSDYILSQIKPLHNFLTQLQPFLKLKQKQANLVLKIIEQLPSAKESPDKFLEVCTWVDQIAALNDSKTRKTTSETVRAVLDSLPGSVGGLSPSQASSAASSASSSPGSGISEALRAGATKSKEFLLYLAGFVDGDGSIIAAIKPNQSYKFKHQLSLTFTVTQKTQRRWFLDKLVDEIGVGYVRDQSSVSHYQLSQIKPLHNFLTQLQPFLKLKQKQANLVLKIIEQLPSAKESPDGFLEVCTWADQIAALNDSKTRKTTSETVRAVLDSLSEKKKSSP

SEQ ID NO: 320 - protein, 350 aa, artificial sequence
  MHP14+(15)
MNTKYNKEFLLYLAGFVDSDGSIIAQIKPNQSYKFKHQLMLTFTVTQKTQRRWFLDKLVDEIGVGKVRDRGSVSDYILSQIKPLHNFLTQLQPFLKLKQKQANLVLKIIEQLPSAKESPDKFLEVCTWVDQIAALNDSKTRKTTSETVRAVLDSLPGSVGGLSPSQASSAASSASSSPGSGISEALRAGATKSKEFLLYLAGFVDGDGSIIAAIKPNQSYKFKHQLSLTFTVTQKTQRRWFLDKLVDEIGVGYVRDQGSVSHYQLSQIKPLHNFLTQLQPFLKLKQKQANLVLKIIEQLPSAKESPDKFLEVCTWVDQIAALNDSKTRKTTSETVRAVLDSLSEKKKSSP

SEQ ID NO: 321 - DNA, 1239 bp, artificial sequence
  MHP14 (with intron) maize
atgaacaccaagtacaacaaggagttcctgctctacctggccggcttcgtggacggcgacggctccatcatcgcgcagatcaagccgaaccagtcctacaagttcaagcaccagctcatgctgaccttcaccgtgacccagaagacgcagaggcgctggttcctcgacaagctggtcgacgagatcggggtgggctacgtccgcgaccgcgggtcggtgtccgactacatcctctcccagatcaagcccctgcacaacttcctcacccagctccagccgttcctcaagctgaagcagaagcaggcgaacctcgtcctgaagatcatcgagcagctcccctcggccaaggagtccccggacaagttcctggaggtaagtttctgcttctacctttgatatatatataataattatcattaattagtagtaatataatatttcaaatatttttttcaaaataaaagaatgtagtatatagcaattgcttttctgtagtttataagtgtgtatattttaatttataacttttctaatatatgaccaaaacatggtgatgtgcaggtgtgcacgtgggtcgaccagatcgcggccctcaacgacagcaagacccgcaagacgacctcggagacggtgcgggcggtcctggactccctcccaggatccgtgggaggtctatcgccatctcaggcatccagcgccgcatcctcggcttcctcaagcccgggttcagggatctccgaagcactcagagctggagcaactaagtccaaggaattcctgctctacctggccggcttcgtggacggcgacggctccatcatcgcggcgatcaagccgaaccagtcctacaagttcaagcaccagctctccctgaccttcaccgtgacccagaagacgcagaggcgctggttcctcgacaagctggtcgacgagatcggggtgggctacgtccgcgaccaggggtcggtgtcccactaccagctctcccagatcaagcccctgcacaacttcctcacccagctccagccgttcctcaagctgaagcagaagcaggcgaacctcgtcctgaagatcatcgagcagctcccctcggccaaggagtccccggacaagttcctggaggtgtgcacgtgggtcgaccagatcgcggccctcaacgacagcaagacccgcaagacgacctcggagacggtgcgggcggttctagactccctcagcgagaagaagaagtcgtccccc

SEQ ID NO: 322 - DNA, 1239 bp, artificial sequence
  MHP14+(04) (with intron) maize
atgaacaccaagtacaacaaggagttcctgctctacctggccggcttcgtggacagcgacggctccatcatcgcgcagatcaagccgaaccagtcctacaagttcaagcaccagctcatgctgaccttcaccgtgacccagaagacgcagaggcgctggttcctcctcaagctggtcgacgagatcggggtgggcaaggtccgcgaccgcgggtcggtgtccgactacatcctctcccagatcaagcccctgcacaacttcctcacccagctgcagccgttcctcaagctgaagcagaagcaggcggtgctcgtcctgaagatcatcgagcagctcccctcggccaaggagtccccggacggcttcctggaggtaagtttctgcttctacctttgatatatatataataattatcattaattagtagtaatataatatttcaaatatttttttcaaaataaaagaatgtagtatatagcaattgcttttctgtagtttataagtgtgtatattttaatttataacttttctaatatatgaccaaaacatggtgatgtgcaggtgtgcacgtgggtcgaccaggtcgcggccctcaacgacagcaagacccgcaagacgacctcggagacggtgcgggcggtcctgatgtccctcccaggatccgtgggaggtctatcgccatctcaggcatccagcgccgcatcctcggcttcctcaagcccgggttcagggatctccgaagcactcagagctggagcaactaagtccaaggaattcctgctctacctggccggcttcgtggacggcgacggctccatcatcgcggcgatcaagccgaaccagtcctacaagttcaagcaccagctctccctgaccttcaccgtgacccagaagacgcagaggcgctggttcctcgacaagctggtcgacgagatcggggtgggctacgtccgcgaccaggggtcggtgtcccactaccagctctcccagatcaagcccctgcacaacttcctcacccagctccagccgttcctcaagctgaagcagaagcaggcgaacctcgtcctgaagatcatcgagcagctcccctcggccaaggagtccccggacgggttcctggaggtgtgcacgtgggctgaccaggtcgcggccctcaacgacagcaagacccgcaagacgacctcggagacggtgcgggcggttctagactccctcagcgagaagaagaagtcgtccccc

SEQ ID NO: 323 - DNA, 1239 bp, artificial sequence
  MHP14+(06) (with intron) maize
atgaacaccaagtacaacaaggagttcctgctctacctggccggcttcgtggacggcgacggctccatcatcgcgcagatcaagccgaaccagtcctacaagttcaagcaccagctcatgctgaccttcaccgtgacccagaagacgaggaggcgctggttcctcctcaagctggtcgacgagatcggggtgggcaaggtccgcgaccgcgggtcggtgtccgactacatcctctcccagaagaagcccctgcacaacttcctcacccagctgcagccgttcctcaagctgaagcagaagcaggcgaacctcgtcctgaagatcatcgagcagctcccctcggccaaggagtccccggacggcttcctggaggtaagtttctgcttctacctttgatatatatataataattatcattaattagtagtaatataatatttcaaatatttttttcaaaataaaagaatgtagtatatagcaattgcttttctgtagtttataagtgtgtatattttaatttataacttttctaatatatgaccaaaacatggtgatgtgcaggtgtgcacgtgggtcgaccagatcgcggccctcaacgacagcaagacccgcaagacgacctcggagacggtgcgggcggtcctggactccctcccaggatccgtgggaggtctatcgccatctcaggcatccagcgccgcatcctcggcttcctcaagcccgggttcagggatctccgaagcactcagagctggagcaactaagtccaaggaattcctgctctacctggccggcttcgtggacggcgacggctccatcatcgcggcgatcaagccgaaccagtcctacaagttcaagcaccagctctccctgaccttcaccgtgacccagaagacgcagaggcgctggttcctcgacgagctggtcgacgagatcggggtgggctacgtccgcgaccaggggtcggtgtcccactaccagctctcccagatcaagcccctgcacaacttcctcacccagctccagccgtacctcaagctgaagcagaagcaggcgaacctcgtcctgaagatcatcgagcagctcccctcggccaaggagtccccggacaagttcctggaggtgtgcacgtgggtcgaccaggtcgcggccctcaacgacagcaagacccgcaagacgacctcggagacggtgcgggcggttctagactccctcagcgagaagaagaagtcgtccccc

SEQ ID NO: 324 - DNA, 1239 bp, artificial sequence
  MHP14+(08) (with intron) maize
atgaacaccaagtacaacaaggagttcctgctctacctggccggcttcgtggacggcgacggctgcatcatcgcgcagatcaagccgaaccagtcctacaagttcaagcaccagctcatgctgaccttcaccgtgacccagaagacgaagaggcgctggattctcctcaagctggtcgacgagatcggggtgggcaaggtccgcgaccgcgggtcggtgtccgactacatcctctcccagatcaagcccctgcacaacttcctcacccagctgcagccgttcctcaagctgaagcagaagcaggcgaacctcgtcctgaagatcatcgagcagctcccctcggccaaggagtccccggacaagttcctggaggtaagtttctgcttctacctttgatatatatataataattatcattaattagtagtaatataatatttcaaatatttttttcaaaataaaagaatgtagtatatagcaattgcttttctgtagtttataagtgtgtatattttaatttataacttttctaatatatgaccaaaacatggtgatgtgcaggtgtgcacgtgggtcgaccagatcgcggccctcaacgacagcaagacccgcaagacgacctcggagacggtgcgggcggtcctggactccctcccaggatccgtgggaggtctatcgccatctcaggcatccagcgccgcatcctcggcttcctcaagcccgggttcagggatctccgaagcactcagagctggagcaactaagtccaaggaattcctgctctacctggccggcttcgtggacggcgacggctccatcatcgcggcgatcaagccgaaccagtcctacaagttcaagcaccagctctccctgaccttcaccgtgacccagaagacgcagaggcgctggttcctcgacaagctggtcgacgagatcggggtgggctacgtccgcgaccaggggtcggtgtcccactaccagctctcccagatcaagcccctgcacaacttcctcacccagctccagccgttcctcaagctgaagcagaagcaggcgaacctcgtcctgaagatcatcgagcagctcccctcggccaaggagtccccggacaagttcctggaggtgtgcacgtgggcggaccagatcgcggccctcaacgacagcaagacccgcaagacgacctcggagacggtgcgggcggttctagactccctcagcgagaagaagaagtcgtccccc

SEQ ID NO: 325 - DNA, 1239 bp, artificial sequence
  MHP14+(12) (with intron) maize
atgaacaccaagtacaacaaggagttcctgctctacctggccggcatcgtggacggcgacggctccatcatcgcgcagatcaagccgaaccagtcctacaagttcaagcaccagctcatgctgaccttcaccgtgacccagaagacgaagaggcgctggttcctcgacaagctggtcgacgagatcggggtgggcaaggtccgcgaccgcgggtcggtgtccgactacatcctctcccagatcaagcccctgcacaacttcctcacccagctgcagccgttcctcaagctgaagcagaagcaggcggtgctcgtcctgaagatcatcgagcagctcccctcggccaaggagtccccggacaagttcctggaggtaagtttctgcttctacctttgatatatatataataattatcattaattagtagtaatataatatttcaaatatttttttcaaaataaaagaatgtagtatatagcaattgcttttctgtagtttataagtgtgtatattttaatttataacttttctaatatatgaccaaaacatggtgatgtgcaggtgtgcacgtgggtcgaccaggtcgcggccctcaacgacagcaagacccgcaagacgacctcggagacggtgcgggcggtcctgatgtccctcccaggatccgtgggaggtctatcgccatctcaggcatccagcgccgcatcctcggcttcctcaagcccgggttcagggatctccgaagcactcagagctggagcaactaagtccaaggaattcctgctctacctggccggcttcgtggacggcgacggctccatcatcgcggcgatcaagccgaaccagtcctacaagttcaagcaccagctctccctgaccttcaccgtgacccagaagacgcagaggcgctggttcctcgacgagctggtcgacgagatcggggtgggctacgtccgcgaccaggggtcggtgtcccactaccagctctcccagatcaagcccctgcacaacttcctcacccagctccagccgtacctcaagctgaagcagaagcaggcgaacctcgtcctgaagatcatcgagcagctcccctcggccaaggagtccccggacaagttcctggaggtgtgcacgtgggtcgaccagatcgcggccctcaacgacagcaagacccgcaagacgacctcggagacggtgcgggcggttctagactccctcagcgagaagaagaagtcgtccccc

SEQ ID NO: 326 - DNA, 1239 bp, artificial sequence
  MHP14+(14) (with intron) maize
atgaacaccaagtacaacaaggagttcctgctctacctggccggcttcgtggacggcgacggctccatcatcgcgcagatcaagccgaaccagtcctacaagttcaagcaccagctcatgctgaccttcaccgtgacccagaagacgaggaggcgctggttcctcgacaagctggtcgacgagatcggggtgggcaaggtccgcgaccgcgggtcggtgtccgactacatcctctcccagatcaagcccctgcacaacttcctcacccagctgcagccgttcctcaagctgaagcagaagcaggcgaacctcgtcctgaagatcatcgagcagctcccctcggccaaggagtccccggacaagttcctggaggtaagtttctgcttctacctttgatatatatataataattatcattaattagtagtaatataatatttcaaatatttttttcaaaataaaagaatgtagtatatagcaattgcttttctgtagtttataagtgtgtatattttaatttataacttttctaatatatgaccaaaacatggtgatgtgcaggtgtgcacgtgggtcgaccagatcgcggccctcaacgacagcaagacccgcaagacgacctcggagacggtgcgggcggtcctggactccctcccaggatccgtgggaggtctatcgccatctcaggcatccagcgccgcatcctcggcttcctcaagcccgggttcagggatctccgaagcactcagagctggagcaactaagtccaaggaattcctgctctacctggccggcttcgtggacggcgacggctccatcatcgcggcgatcaagccgaaccagtcctacaagttcaagcaccagctctccctgaccttcaccgtgacccagaagacgcagaggcgctggttcctcgacaagctggtcgacgagatcggggtgggctacgtccgcgaccagtcgtcggtgtcccactaccagctctcccagatcaagcccctgcacaacttcctcacccagctccagccgttcctcaagctgaagcagaagcaggcgaacctcgtcctgaagatcatcgagcagctcccctcggccaaggagtccccggacgggttcctggaggtgtgcacgtgggccgaccagatcgcggccctcaacgacagcaagacccgcaagacgacctcggagacggtgcgggcggttctagactccctcagcgagaagaagaagtcgtccccc

SEQ ID NO: 327 - DNA, 1239 bp, artificial sequence
  MHP14+(15) (with intron) maize
atgaacaccaagtacaacaaggagttcctgctctacctggccggcttcgtggacagcgacggctccatcatagcgcagatcaagccgaaccagtcctacaagttcaagcaccagctcatgctgaccttcacggtgacccagaagacgcagaggcgctggttcctcgacaagctggtcgacgagatcggggtgggcaaggtccgtgaccgcgggtcggtgtccgactacatcctctcccagatcaagcccctgcacaacttcctcacccagctgcagccgttcctcaagctgaagcagaagcaggcgaacctcgtcctgaagatcatcgagcagctcccctcggccaaggagtccccggacaagttcctggaggtaagtttctgcttctacctttgatatatatataataattatcattaattagtagtaatataatatttcaaatatttttttcaaaataaaagaatgtagtatatagcaattgcttttctgtagtttataagtgtgtatattttaatttataacttttctaatatatgaccaaaacatggtgatgtgcaggtgtgcacgtgggtcgaccagatcgcggccctcaacgacagcaagacccgcaagacgacctcggagacggtgcgggcggtcctggactccctcccaggatccgtgggaggtctatcgccatctcaggcatccagcgccgcatcctcggcttcctcaagcccgggttcagggatctccgaagcactcagagctggagcaactaagtccaaggaattcctgctctacctggccggcttcgtggacggcgacggctccatcatcgcggcgatcaagccgaaccagtcctacaagttcaagcaccagctctccctgaccttcaccgtgacccagaagacgcagaggcgctggttcctcgacaagctggtcgacgagatcggggtgggctacgtccgcgaccaggggtcggtgtcccactaccagctctcccagatcaagcccctgcacaacttcctcacccagctccagccgttcctcaagctgaagcagaagcaggcgaacctcgtcctgaagatcatcgagcagctcccctcggccaaggagtccccggacaagttcctggaggtgtgcacgtgggtcgaccagatcgcggccctcaacgacagcaagacccgcaagacgacctcggagacggtgcgggcggttctagactccctcagcgagaagaagaagtcgtccccc

SEQ ID NO: 328 - DNA, 22 bp, zea mays
ctagtatacgtgagagaccttg

SEQ ID NO: 329 - protein, 350 aa, artificial sequence
  MHP107
MNTKYNKEFLLYLAGFVDGDGSIIAAISPNQSCKFKHQLRLTFTVTQKTQRRWFLDKLVDEIGVGKVYDRGSVSDYQLSQIKPLHNFLTQLQPFLKLKQKQANLVLKIIEQLPSAKESPDKFLEVCTWVDQIAALNDSKTRKTTSETVRAVLDSLPGSVGGLSPSQASSAASSASSSPGSGISEALRAGATKSKEFLLYLAGFVDGDGSIKAQIDPNQSYKFKHQLRLRFQVTQKTQRRWFLDKLVDEIGVGYVYDRGSVSDYILSQIKPLHNFLTQLQPFLKLKQKQANLVLKIIEQLPSAKESPDKFLEVCTWVDQIAALNDSKTRKTTSETVRAVLDSLSEKKKSSP

SEQ ID NO: 330 - protein, 350 aa, artificial sequence
  MHP107(C1)
MNTKYNKEFLLYLAGFVDGDGSIIAAISPNQSCKFKHQLRLTFTVTQKTRRRWILDKLVDEIGVGKVYDRGSVSDYQLSQIKPLHNFLTQLQPFLKLKQKQANLALKIIEQLPSAKESPDKFLEVCTWVDQIAALNDSKTRKTTSETVRAVLLSLPGSVGGLSPSQASSAASSASSSPGSGISETLRAGATKSKEFLLYLAGFVDGDGSIKAQIDPNQSYKFKHQLRLRFQVTQKTQRRWILDKLVDEIGVGHVYDRGSVSDYILSQIKPLHNFLTQLQPFLKLKQKQANLVLKIIEQLPSAKESPDKFLEVCTWADRIAALNDSKTRKTTSETVRAVLDSLSEKKKSSP

SEQ ID NO: 331 - protein, 350 aa, artificial sequence
  MHP107(C2)
MNTKYNKEFLLYLAGFVDGDGSIIAAISPNQSCKFKHQLRLTFTVTQKTQRRWFLDKLVDEIGVGKVYDRGSVSDYQLSQIKPLHNFLTQLQPFLKLKQKQANLVLKIIEQLPSAKESPDKFLEVCTWVDQIAALNDSKTRKTTSETVRAVLDSLPGSVGGLSPSQASSAASSASSSPGSGISEALRAGATKSKEFLLYLAGFVDGDGSIKAQIDPNQSYKFKHQLRLRFQVTQKTQRRWFLDKLVDEIGVGYVYDRGSVSDYILSQIKPLHNFLTQLQPFLKLKQKQANLVLKIIEQLPSAKESPDKFLRVCTWVDQIAALNDSKTRKTTSETVRAVLDSLSEKKKSSP

SEQ ID NO: 332 - protein, 350 aa, artificial sequence
  MHP107(C3)
MNTKYNKEFLLYLAGFVDGDGSIIAAISPNQRCKFKHQLRLTFTVTQKTRRRWFLDELVDEIGVGKVYDRGSVSDYQLSQIKPLHNFLTQLQPFLKLKQKQANLVLKIIEQLPSAKESPDKFLRVCTWVDQIAALNDSKTRKTTSETVRAVLLSLPGSVGGLSPSQASSAASSASSSPGSGISEALRAGATKSKEFLLYLAGFVDGDGSIMAQIDPNQSYKFKHQLRLRFQVTQKTQRRWFLDKLVDEIGVGYVYDRGSVSDYILSQIKPLHNFLTQLQPFLKLKQKQANLVLKIIEQLPSAKESPDKFLEVCTWVDQIAALNDSKTRKTTSETVRAVLDSLSEKKKSSP

SEQ ID NO: 333 - protein, 350 aa, artificial sequence
  MHP107(C4)
MNTKYNKEFLLYLAGFVDGDGSIIAAISPNQSCKFKHQLRLTFTVTQKTRRRWFLDKLVDEIGVGKVYDRGSVSDYQLSRIKPLHNFLTQLQPFLKLKQKQANLVLKIIEQLPSAKESPDKFLRVCTWVDRIAALNDSKTRKTTSETVRAVLDSLPGSVGGLSPSQASSAASSASSSPGSGISEALRAGATKSKEFLLYLAGFVDGDGSIKAQIDPNQSYKFKHQLRLRFQVTQKTQRRWFLDKLVDEIGVGYVYDRGSVSDYILSQIKPLHNFLTQLQPFLKLKQKQANLVLKIIEQLPSAKESPDKFLEVCTWVDQIAALNDSKTRKTTSETVRAVLDSLSEKKKSSP

SEQ ID NO: 334 - protein, 350 aa, artificial sequence
  MHP107(C5)
MNTKYNKEFLLYLAGFVDGDGSIIAAISPNQSCKFKHQLRLTFTVTQKTRRRWILDELVDEIGVGKVYDRGSVSDYQLSQIKPLHNFLTQLQPFLKLKQKQANLALKIIEQLPSAKESPDKFLRVCTWVDQIAALNDSKTRKTTSETVRAVLDSLPGSVGGLSPSQASSAASSASSSPGSGISEALRAGATKSKEFLLYLAGFVDGDGSIKAQIDPNQSYKFKHQLRLRFQVTQKTQRRWFLDKLVDEIGVGYVYDRGSVSDYILSQIKPLHNFLTQLQPFLKLKQKQANLVLKIIEQLPSAKESPDKFLEVCTWVDQIAALNDSKTRKTTSETVRAVLDSLSEKKKSSP

SEQ ID NO: 335 - protein, 350 aa, artificial sequence
  MHP107(C6)
MNTKYNKEFLLYLAGFVDGDGSIIAAISPNQSCKFKHQLRLTFTVTQKTRRRWILDKLVDEIGVGKVYDRGSVSDYQLSQIKPLHNFLTQLQPFLKLKQKQANLALKIIEQLPSAKESPDKFLEVCTWVDQIAALNDSKTRKTTSETVRAVLDSLPGSVGGLSPSQASSAASSASSSPGSGISEALRAGATKSKEFLLYLAGFVDGDGSIKAQIDPNQSYKFKHQLRLRFQVTQKTQRRWILDKLVDEIGVGYVYDRGSVSDYILSQIKPLHNFLTQLQPFLKLKQKQANLVLKIIEQLPSAKESPDKFLEVCTWVDQIAALNDSKTRKTTSETVRAVLDSLSEKKKSSP

SEQ ID NO: 336 - protein, 350 aa, artificial sequence
  MHP107(D2)
MNTKYNKEFLLYLAGFVDGDGSIIAAISPNQSCKFKHQLRLTFTVTQKTRRRWILLKLVDEIGVGKVYDRGSVSDYQLSQIKPLHNFLTQLQPFLKLKQKQANLVLKIIEQLPSAKESPDKFLEVCTWVDQIAALNDSKTRKTTSETVRAVLDSLPGSVGGLSPSQASSAASSASSSPGSGISEALRAGATKSKEFLLYLAGFVDGDGSIKAQIDPNQSYKFKHQLRLRFQVTQKTQRRWFLDKLVDEIGVGYVYDRGSVSDYILSQIKPLHNFLTQLQPFLKLKQKQANLVLKIIEQLPSAKESPDKFLEVCTWADRIAALNDSKTRKTTSETVRAVLLSLSEKKKSSP

SEQ ID NO: 337 - protein, 350 aa, artificial sequence
  MHP107(D3)
MNTKYNKEFLLHLAGFVDGDGSIMAAISPNQSCKFKHQLRLTFTVTQKTQRRWFLDKLVDEIGVGKVYDRGSVSDYQLSRIKPLHNFLTQLQPFLKLKQKQANLALKIIEQLPSAKESPDKFLRVCTWADQIAALNDSKTRKTTSETVRAVLLSLPGSVGGLSPSQASSAASSASSSPGSGISEALRAGATKSKEFLLYLAGFVDGDGSIKAQIDPNQSYKFKHQLRLRFQVTQKTQRRWFLDKLVDEIGVGYVYDRGSVSDYILSQIKPLHNFLTQLQPFLKLKQKQANLALKIIEQLPSAKESPDKFLEVCTWADRIAALNDSKTRKTTSETVRAVLDSLSEKKKSSP

SEQ ID NO: 338 - protein, 350 aa, artificial sequence
  MHP107(D4)
MNTKYNKEFLLHLAGFVDGDGSIIAAISPNQSCKFKHQLRLTFTVTQKTRRRWFLDKLVDEIGVGKVYDRGSVSDYQLSQIKPLHNFLTQLQPFLKLKQKQANLALKIIEQLPSAKESPDKFLEVCTWADQIAALNDSKTRKTTSETVRAVLLSLPGSVGGLSPSQASSAASSASSSPGSGISEALRAGATKSKEFLLYLAGFVDGDGSIKAQIDPNQSYKFKHQLRLRFQVTQKTQRRWFLDKLVDEIGVGYVYDRGSVSDYILSQIKPLHNFLTQLQPFLKLKQKQANLVLKIIEQLPSAKESPDKFLEVCTWVDQIAALNDSKTRKTTSETVRAVLDSLSEKKKSSP

SEQ ID NO: 339 - protein, 350 aa, artificial sequence
  MHP107(D5)
MNTKYNKEFLLHLAGFVDGDGSIMAAISPNQSCKFKHQLRLTFTVTQKTRRRWILDELVDEIGVGKVYDRGSVSDYQLSQIKPLHNFLTQLQPFLKLKQKQANLALKIIEQLPSAKESPDKFLRVCTWADQIAALNDSKTRKTTSETVRAVLLSLPGSVGGLSPSQASSAASSASSSPGSGISEALRAGATKSKEFLLYLAGFVDGDGSIKAQIDPNQSYKFKHQLRLRFQVTQKTQRRWFLDKLVDEIGVGYVYDRGSVSDYILSQIKPLHNFLTQLQPFLKLKQKQANLALKIIEQLPSAKESPDKFLRVCTWVDQIAALNDSKTRKTTSETVRAVLDSLSEKKKSSP

SEQ ID NO: 340 - protein, 350 aa, artificial sequence
  MHP107(D1)
MNTKYNKEFLLHLAGFVDGDGSIMAAISPNQSCKFKHQLRLTFTVTQKTQRRWFLDKLVDEIGVGKVYDRGSVSDYQLSQIKPLHNFLTQLQPFLKLKQKQANLALKIIEQLPSAKESPDKFLRVCTWVDQIAALNDSKTRKTTSETVRAVLLSLPGSVGGLSPSQASSAASSASSSPGSGISEALRAGATKSKEFLLYLAGFVDGDGSIMAQIDPNQSYKFKHQLRLRFQVTQKTQRRWFLDKLVDEIGVGYVYDRGSVSDYILSQIKPLHNFLTQLQPFLKLKQKQANLVLKIIEQLPSAKESPDKFLRVCTWVDQIAALNDSKTRKTTSETVRAVLDSLSEKKKSSP

SEQ ID NO: 341 - protein, 350 aa, artificial sequence
  MHP107(D6)
MNTKYNKEFLLHLAGFVDGDGSIMAAISPNQRCKFKHQLRLTFTVTQKTRRRWFLDKLVDEIGVGKVYDRGSVSDYQLSQIKPLHNFLTQLQPFLKLKQKQANLALKIIEQLPSAKESPDKFLRVCTWVDQIAALNDSKTRKTTSETVRAVLLSLPGSVGGLSPSQASSAASSASSSPGSGISEALRAGATKSKEFLLYLAGFVDGDGSIKAQIDPNQSYKFKHQLRLRFQVTQKTQRRWFLDKLVDEIGVGYVYDRGSVSDYILSQIKPLHNFLTQLQPFLKLKQKQANLVLKIIEQLPSAKESPDKFLEVCTWVDQIAALNDSKTRKTTSETVRAVLDSLSEKKKSSP

SEQ ID NO: 342 - DNA, 1050 bp, artificial sequence
  MHP107 yeast;
atgaacaccaagtacaacaaggagttcctgctctacctggccggcttcgtggacggcgacggctccatcatcgcggcgatctccccgaaccagtcctgcaagttcaagcaccagctccgcctgaccttcaccgtgacccagaagacgcagaggcgctggttcctcgacaagctggtcgacgagatcggggtgggcaaggtctacgaccgcgggtcggtgtccgactaccagctctcccagatcaagcccctgcacaacttcctcacccagctccagccgttcctcaagctgaagcagaagcaggcgaacctcgtcctgaagatcatcgagcagctcccctcggccaaggagtccccggacaagttcctggaggtgtgcacgtgggtcgaccagatcgcggccctcaacgacagcaagacccgcaagacgacctcggagacggtgcgggcggtcctggactccctcccaggatccgtgggaggtctatcgccatctcaggcatccagcgccgcatcctcggcttcctcaagcccgggttcagggatctccgaagcactcagagctggagcaactaagtccaaagagtttttattatatttagcggggtttgtcgatggggatgggagtataaaagcccaaatagatcccaatcaatcttataaatttaaacatcaattaaggttaagatttcaggtcacgcaaaaaacccaacgtaggtggtttttagataaattagtggatgaaataggcgtcgggtatgtgtatgataggggcagcgtcagtgattatatattaagtcaaataaaaccgttacataattttttaacgcaattacaaccctttttaaaattaaaacaaaaacaagccaatttagtgttaaaaataatagaacaattaccgagcgcgaaagaaagtcccgataaatttttagaagtctgtacctgggtggatcaaatagccgcgttaaatgattcaaaaacgaggaaaaccacgagcgaaaccgtcagagccgtgttagatagtttatcagaaaagaagaaaagcagtccg

SEQ ID NO: 343 - DNA, 1050 bp, artificial sequence
  MHP107(C1)
atgaacaccaagtacaacaaggagttcctgctctacctggccggcttcgtggacggcgacggctccatcatcgcggcgatctccccgaaccagtcctgcaagttcaagcaccagctccgcctgaccttcaccgtgacccagaagacgagaaggcgctggattctcgataagctggtcgacgagatcggggtgggcaaggtctacgaccgcgggtcggtgtccgactaccagctctcccagatcaagcccctgcacaacttcctcacccagctccagccgttcctcaagctgaagcagaagcaggcgaacctcgccctgaagatcatcgagcagctcccctcggccaaggagtccccggacaagttcctggaggtgtgcacgtgggtcgaccagatcgcggccctcaacgacagcaagacccgcaagacgacctcggagacggtgcgggcggtcctgctatccctcccaggatccgtgggaggtctatcgccatctcaggcatccagcgccgcatcctcggcttcctcaagcccgggttcagggatctccgaaacactcagagctggagcaactaagtccaaagagtttttattatatttagcggggtttgtcgatggggatgggagtataaaagcccaaatagatcccaatcaatcttataaatttaaacatcaattaaggttaagatttcaggtcacgcaaaaaacccaacgtaggtggattttagataaattagtggatgaaataggcgtcgggcatgtgtatgataggggcagcgtcagtgattatatattaagtcaaataaaaccgttacataattttttaacgcaattacaaccctttttaaaattaaaacaaaaacaagccaatttagtgttaaaaataatagaacaattaccgagcgcgaaagaaagtcccgataaatttttagaagtctgtacctgggccgatagaatagccgcgttaaatgattcaaaaacgaggaaaaccacgagcgaaaccgtcagagccgtgttagatagtttatcagaaaagaagaaaagcagtccg

SEQ ID NO: 344 - DNA, 1050 bp, artificial sequence
  MHP107(C2)
atgaacaccaagtacaacaaggagttcctgctctacctggccggcttcgtggacggcgacggctccatcatcgcggcgatctccccgaaccagtcctgcaagttcaagcaccagctccgcctgaccttcaccgtgacccagaagacgcagaggcgctggttcctcgacaagctggtcgacgagatcggggtgggcaaggtctacgaccgcgggtcggtgtccgactaccagctctcccagatcaagcccctgcacaacttcctcacccagctccagccgttcctcaagctgaagcagaagcaggcgaacctcgtcctgaagatcatcgagcagctcccctcggccaaggagtccccggacaagttcctggaggtgtgcacgtgggtcgaccagatcgcggccctcaacgacagcaagacccgcaagacgacctcggagacggtgcgggcggtcctggactccctcccaggatccgtgggaggtctatcgccatctcaggcatccagcgccgcatcctcggcttcctcaagcccgggttcagggatctccgaagcactcagagctggagcaactaagtccaaagagtttttattatatttagcggggtttgtcgatggggatgggagtataaaagcccaaatagatcccaatcaatcttataaatttaaacatcaattaaggttaagatttcaggtcacgcaaaaaacccaacgtaggtggtttttagataaattagtggatgaaataggcgtcgggtatgtgtatgataggggcagcgtcagtgattatatattaagtcaaataaaaccgttacataattttttaacgcaattacaaccctttttaaaattaaaacaaaaacaagccaatttagtgttaaaaataatagaacaattaccgagcgcgaaagaaagtcccgataaatttttaagagtctgtacctgggtggatcagatagccgcgttaaatgattcaaaaacgaggaaaaccacgagcgaaaccgtcagagccgtgttagatagtttatcagaaaagaagaaaagcagtccg

SEQ ID NO: 345 - DNA, 1050 bp, artificial sequence
  MHP107(C3)
atgaacaccaagtacaacaaggagttcctgctctacctggccggcttcgtggacggcgacggctccatcatcgcggcgatctccccgaaccagaggtgcaagttcaagcaccagctccgcctgaccttcaccgtgacccagaagacgagaaggcgctggtttctcgatgagctggtcgacgagatcggggtgggcaaggtctacgaccgcgggtcggtgtccgactaccagctctcccagatcaagcccctgcacaacttcctcacccagctccagccgttcctcaagctgaagcagaagcaggcgaacctcgtcctgaagatcatcgagcagctcccctcggccaaggagtccccggacaagttcctgagagtgtgcacgtgggtcgaccagatcgcggccctcaacgacagcaagacccgcaagacgacctcggagacggtgcgggcggtcctgctatccctcccaggatccgtgggaggtctatcgccatctcaggcatccagcgccgcatcctcggcttcctcaagcccgggttcagggatctccgaagcactcagagctggagcaactaagtccaaagagtttttattatatttagcggggtttgtcgatggggatgggagtataatggcccaaatagatcccaatcaatcttataaatttaaacatcaattaaggttaagatttcaggtcacgcaaaaaacccagcgtaggtggtttttagataaattagtggatgaaataggcgtcgggtatgtgtatgataggggcagcgtcagtgattatatattaagtcaaataaaaccgttacataattttttaacgcaattacaaccctttttaaaattaaaacaaaaacaagccaatttagtgttaaaaataatagaacaattaccgagcgcgaaagaaagtcccgataaatttttagaagtctgtacctgggtggatcaaatagccgcgttaaatgattcaaaaacgaggaaaaccacgagcgaaaccgtcagagccgtgttagatagtttatcagaaaagaagaaaagcagtccg

SEQ ID NO: 346 - DNA, 1050 bp, artificial sequence
  MHP107(C4)
atgaacaccaagtacaacaaggagttcctgctctacctggccggcttcgtggacggcgacggctccatcatcgcggcgatctccccgaaccagtcctgcaagttcaagcaccagctccgcctgaccttcaccgtgacccagaagacgagaaggcgctggttcctcgacaagctggtcgacgagatcggggtgggcaaggtctacgaccgcgggtcggtgtccgactaccagctctccagaatcaagcccctgcacaacttcctcacccagctccagccgttcctcaagctgaagcagaagcaggcgaacctcgtcctgaagatcatcgagcagctcccctcggccaaggagtccccggacaagttcctgagagtgtgcacgtgggtcgacagaatcgcggccctcaacgacagcaagacccgcaagacgacctcggagacggtgcgggcggtcctggactccctcccaggatccgtgggaggtctatcgccatctcaggcatccagcgccgcatcctcggcttcctcaagcccgggttcagggatctccgaagcactcagagctggagcaactaagtccaaagagtttttattatatttagcggggtttgtcgatggggatgggagtataaaagcccaaatagatcccaatcaatcttataaatttaaacatcaattaaggttaagatttcaggtcacgcaaaaaacccaacgtaggtggtttttagataaattagtggatgaaataggcgtcgggtatgtgtatgataggggcagcgtcagtgattatatattaagtcaaataaaaccgttacataattttttaacgcaattacaaccctttttaaaattaaaacaaaaacaagccaatttagtgttaaaaataatagaacaattaccgagcgcgaaagaaagtcccgataaatttttagaagtctgtacctgggtggatcaaatagccgcgttaaatgattcaaaaacgaggaaaaccacgagcgaaaccgtcagagccgtgttagatagtttatcagaaaagaagaaaagcagtccg

SEQ ID NO: 347 - DNA, 1050 bp, artificial sequence
  MHP107(C5)
atgaacaccaagtacaacaaggagttcctgctctacctggccggcttcgtggacggcgacggctccatcatcgcggcgatctccccgaaccagtcctgcaagttcaagcaccagctccgcctgaccttcaccgtgacccagaagacgagaaggcgctggattctcgatgagctggtcgacgagatcggggtgggcaaggtctacgaccgcgggtcggtgtccgactaccagctctcccagatcaagcccctgcacaacttcctcacccagctccagccgttcctcaagctgaagcagaagcaggcgaacctcgccctgaagatcatcgagcagctcccctcggccaaggagtccccggacaagttcctgagagtgtgcacgtgggtcgaccagatcgcggccctcaacgacagcaagacccgcaagacgacctcggagacggtgcgggcggtcctagactccctcccaggatccgtgggaggtctatcgccatctcaggcatccagcgccgcatcctcggcttcctcaagcccgggttcagggatctccgaagcactcagagctggagcaactaagtccaaagagtttttattatatttagcggggtttgtcgatggggatgggagtataaaagcccaaatagatcccaatcaatcttataaatttaaacatcaattaaggttaagatttcaggtcacgcaaaaaacccaacgtaggtggtttttagataaattagtggatgaaataggcgtcgggtatgtgtatgataggggcagcgtcagtgattatatattaagtcaaataaaaccgttacataattttttaacgcaattacaaccctttttaaaattaaaacaaaaacaagccaatttagtgttaaaaataatagaacaattaccgagcgcgaaagaaagtcccgataaatttttagaagtctgtacctgggtggatcaaatagccgcgttaaatgattcaaaaacgaggaaaaccacgagcgaaaccgtcagagccgtgttagatagtttatcagaaaagaagaaaagcagtccg

SEQ ID NO: 348 - DNA, 1050 bp, artificial sequence
  MHP107(C5)
atgaacaccaagtacaacaaggagttcctgctctacctggccggcttcgtggacggcgacggctccatcatcgcggcgatctccccgaaccagtcctgcaagttcaagcaccagctccgcctgaccttcaccgtgacccagaagacgagaaggcgctggattctcgacaagctggtcgacgagatcggggtgggcaaggtctacgaccgcgggtcggtgtccgactaccagctctcccagatcaagcccctgcacaacttcctcacccagctccagccgttcctcaagctgaagcagaagcaggcgaacctcgccctgaagatcatcgagcagctcccctcggccaaggagtccccggacaagttcctggaggtgtgcacgtgggtcgaccagatcgcggccctcaacgacagcaagacccgcaagacgacctcggagacggtgcgggcggtcctggactccctcccaggatccgtgggaggtctatcgccatctcaggcatccagcgccgcatcctcggcttcctcaagcccgggttcagggatctccgaagcactcagagctggagcaactaagtccaaagagtttttattatatttagcggggtttgtcgatggggatgggagtataaaagcccaaatagatcccaatcaatcttataaatttaaacatcaattaaggttaagatttcaggtcacgcaaaaaacccagcgtaggtggattttagataaattagtggatgaaataggcgtcgggtatgtgtatgataggggcagcgtcagtgattatatattaagtcaaataaaaccgttacataattttttaacgcaattacaaccctttttaaaattaaaacaaaaacaagccaatttagtgttaaaaataatagaacaattaccgagcgcgaaagaaagtcccgataaatttttagaagtctgtacctgggtggatcaaatagccgcgttaaatgattcaaaaacgaggaaaaccacgagcgaaaccgtcagagccgtgttagatagtttatcagaaaagaagaaaagcagtccg

SEQ ID NO: 349 - DNA, 1050 bp, artificial sequence
  MHP107(D2)
atgaacaccaagtacaacaaggagttcctgctctacctggccggcttcgtggacggcgacggctccatcatcgcggcgatctccccgaaccagtcctgcaagttcaagcaccagctccgcctgaccttcaccgtgacccagaagacgagaaggcgctggattctcttaaagctggtcgacgagatcggggtgggcaaggtctacgaccgcgggtcggtgtccgactaccagctctcccagatcaagcccctgcacaacttcctcacccagctccagccgttcctcaagctgaagcagaagcaggcgaacctcgtcctgaagatcatcgagcagctcccctcggccaaggagtccccggacaagttcctggaggtgtgcacgtgggtcgaccagatcgcggccctcaacgacagcaagacccgcaagacgacctcggagacggtgcgggcggtcctggactccctcccaggatccgtgggaggtctatcgccatctcaggcatccagcgccgcatcctcggcttcctcaagcccgggttcagggatctccgaagcactcagagctggagcaactaagtccaaagagtttttattatatttagcggggtttgtcgatggggatgggagtataaaagcccaaatagatcccaatcaatcttataaatttaaacatcaattaaggttaagatttcaggtcacgcaaaaaacccaacgtaggtggtttttagataaattagtggatgaaataggcgtcgggtatgtgtatgataggggcagcgtcagtgattatatattaagtcaaataaaaccgttacataattttttaacgcaattacaaccctttttaaaattaaaacaaaaacaagccaatttagtgttaaaaataatagaacaattaccgagcgcgaaagaaagtcccgataaatttttagaagtctgtacctgggccgatagaatagccgcgttaaatgattcaaaaacgaggaaaaccacgagcgaaaccgtcagagccgtgttattgagtttatcagaaaagaagaaaagcagtccg

SEQ ID NO: 350 - DNA, 1050 bp, artificial sequence
  MHP107(D3)
atgaacaccaagtacaacaaggagttcctgctccatctggccggcttcgtggacggcgacggctccatcatggcggcgatctccccgaaccagtcctgcaagttcaagcaccagctccgcctgaccttcaccgtgacccagaagacgcagaggcgctggttcctcgacaagctggtcgacgagatcggggtgggcaaggtctacgaccgcgggtcggtgtccgactaccagctctccagaatcaagcccctgcacaacttcctcacccagctccagccgttcctcaagctgaagcagaagcaggcgaacctcgccctgaagatcatcgagcagctcccctcggccaaggagtccccggacaagttcctgagagtgtgcacgtgggccgaccagatcgcggccctcaacgacagcaagacccgcaagacgacctcggagacggtgcgggcggtcctgctatccctcccaggatccgtgggaggtctatcgccatctcaggcatccagcgccgcatcctcggcttcctcaagcccgggttcagggatctccgaagcactcagagctggagcaactaagtccaaagagtttttattatatttagcggggtttgtcgatggggatgggagtataaaagcccaaatagatcccaatcaatcttataaatttaaacatcaattaaggttaagatttcaggtcacgcaaaaaacccaacgtaggtggtttttagataaattagtggatgaaataggcgtcgggtatgtgtatgataggggcagcgtcagtgattatatattaagtcaaataaaaccgttacataattttttaacgcaattacaaccctttttaaaattaaaacaaaaacaagccaatttagccttaaaaataatagaacaattaccgagcgcgaaagaaagtcccgataaatttttagaagtctgtacctgggccgatagaatagccgcgttaaatgattcaaaaacgaggaaaaccacgagcgaaaccgtcagagccgtgttagatagtttatcagaaaagaagaaaagcagtccg

SEQ ID NO: 351 - DNA, 1050 bp, artificial sequence
  MHP107(D4)
atgaacaccaagtacaacaaggagttcctgctccatctggccggcttcgtggacggcgacggctccatcatcgcggcgatctccccgaaccagtcctgcaagttcaagcaccagctccgcctgaccttcaccgtgacccagaagacgagaaggcgctggtttctcgataagctggtcgacgagatcggggtgggcaaggtctacgaccgcgggtcggtgtccgactaccagctctcccagatcaagcccctgcacaacttcctcacccagctccagccgttcctcaagctgaagcagaagcaggcgaacctcgccctgaagatcatcgagcagctcccctcggccaaggagtccccggacaagttcctggaggtgtgcacgtgggccgaccagatcgcggccctcaacgacagcaagacccgcaagacgacctcggagacggtgcgggcggtcctgctatccctcccaggatccgtgggaggtctatcgccatctcaggcatccagcgccgcatcctcggcttcctcaagcccgggttcagggatctccgaagcactcagagctggagcaactaagtccaaagagtttttattatatttagcggggtttgtcgatggggatgggagtataaaagcccaaatagatcccaatcaatcttataaatttaaacatcaattaaggttaagatttcaggtcacgcaaaaaacccaacgtaggtggtttttagataaattagtggatgaaataggcgtcgggtatgtgtatgataggggcagcgtcagtgattatatattaagtcaaataaaaccgttacataattttttaacgcaattacaaccctttttaaaattaaaacaaaaacaagccaatttagtgttaaaaataatagaacaattaccgagcgcgaaagaaagtcccgataaatttttagaagtctgtacctgggtggatcaaatagccgcgttaaatgattcaaaaacgaggaaaaccacgagcgaaaccgtcagagccgtgttagatagtttatcagaaaagaagaaaagcagtccg

SEQ ID NO: 352 - DNA, 1050 bp, artificial sequence
  MHP107(D5)
atgaacaccaagtacaacaaggagttcctgctccatctggccggcttcgtggacggcgacggctccatcatggcggcgatctccccgaaccagtcctgcaagttcaagcaccagctccgcctgaccttcaccgtgacccagaagacgagaaggcgctggattctcgatgagctggtcgacgagatcggggtgggcaaggtctacgaccgcgggtcggtgtccgactaccagctctcccagatcaagcccctgcacaacttcctcacccagctccagccgttcctcaagctgaagcagaagcaggcgaacctcgccctgaagatcatcgagcagctcccctcggccaaggagtccccggacaagttcctgagagtgtgcacgtgggccgaccagatcgcggccctcaacgacagcaagacccgcaagacgacctcggagacggtgcgggcggtcctgctatccctcccaggatccgtgggaggtctatcgccatctcaggcatccagcgccgcatcctcggcttcctcaagcccgggttcagggatctccgaagcactcagagctggagcaactaagtccaaagagtttttattatatttagcggggtttgtcgatggggatgggagtataaaagcccaaatagatcccaatcaatcttataaatttaaacatcaattaaggttaagatttcaggtcacgcaaaaaacccaacgtaggtggtttttagataaattagtggatgaaataggcgtcgggtatgtgtatgataggggcagcgtcagtgattatatattaagtcaaataaaaccgttacataattttttaacgcaattacaaccctttttaaaattaaaacaaaaacaagccaatttagccttaaaaataatagaacaattaccgagcgcgaaagaaagtcccgataaatttttaagagtctgtacctgggtggatcagatagccgcgttaaatgattcaaaaacgaggaaaaccacgagcgaaaccgtcagagccgtgttagatagtttatcagaaaagaagaaaagcagtccg

SEQ ID NO: 353 - DNA, 1050 bp, artificial sequence
  MHP107(D1)
atgaacaccaagtacaacaaggagttcctgctccatctggccggcttcgtggacggcgacggctccatcatggcggcgatctccccgaaccagtcctgcaagttcaagcaccagctccgcctgaccttcaccgtgacccagaagacgcagaggcgctggttcctcgacaagctggtcgacgagatcggggtgggcaaggtctacgaccgcgggtcggtgtccgactaccagctctcccagatcaagcccctgcacaacttcctcacccagctccagccgttcctcaagctgaagcagaagcaggcgaacctcgccctgaagatcatcgagcagctcccctcggccaaggagtccccggacaagttcctgagagtgtgcacgtgggtcgaccagatcgcggccctcaacgacagcaagacccgcaagacgacctcggagacggtgcgggcggtcctgctatccctcccaggatccgtgggaggtctatcgccatctcaggcatccagcgccgcatcctcggcttcctcaagcccgggttcagggatctccgaagcactcagagctggagcaactaagtccaaagagtttttattatatttagcggggtttgtcgatggggatgggagtataatggcccaaatagatcccaatcaatcttataaatttaaacatcaattaaggttaagatttcaggtcacgcaaaaaacccaacgtaggtggtttttagataaattagtggatgaaataggcgtcgggtatgtgtatgataggggcagcgtcagtgattatatattaagtcaaataaaaccgttacataattttttaacgcaattacaaccctttttaaaattaaaacaaaaacaagccaatttagtgttaaaaataatagaacaattaccgagcgcgaaagaaagtcccgataaatttttaagagtctgtacctgggtggatcaaatagccgcgttaaatgattcaaaaacgaggaaaaccacgagcgaaaccgtcagagccgtgttagatagtttatcagaaaagaagaaaagcagtccg

SEQ ID NO: 354 - DNA, 1050 bp, artificial sequence
  MHP107(D6)
atgaacaccaagtacaacaaggagttcctgctccatctggccggcttcgtggacggcgacggctccatcatggcggcgatctccccgaaccagaggtgcaagttcaagcaccagctccgcctgaccttcaccgtgacccagaagacgagaaggcgctggtttctcgataagctggtcgacgagatcggggtgggcaaggtctacgaccgcgggtcggtgtccgactaccagctctcccagatcaagcccctgcacaacttcctcacccagctccagccgttcctcaagctgaagcagaagcaggcgaacctcgccctgaagatcatcgagcagctcccctcggccaaggagtccccggacaagttcctgagagtgtgcacgtgggtcgaccagatcgcggccctcaacgacagcaagacccgcaagacgacctcggagacggtgcgggcggtcctgctatccctcccaggatccgtgggaggtctatcgccatctcaggcatccagcgccgcatcctcggcttcctcaagcccgggttcagggatctccgaagcactcagagctggagcaactaagtccaaagagtttttattatatttagcggggtttgtcgatggggatgggagtataaaagcccaaatagatcccaatcaatcttataaatttaaacatcaattaaggttaagatttcaggtcacgcaaaaaacccaacgtaggtggtttttagataaattagtggatgaaataggcgtcgggtatgtgtatgataggggcagcgtcagtgattatatattaagtcaaataaaaccgttacataattttttaacgcaattacaaccctttttaaaattaaaacaaaaacaagccaatttagtgttaaaaataatagaacaattaccgagcgcgaaagaaagtcccgataaatttttagaagtctgtacctgggtggatcaaatagccgcgttaaatgattcaaaaacgaggaaaaccacgagcgaaaccgtcagagccgtgttagatagtttatcagaaaagaagaaaagcagtccg

SEQ ID NO: 355 - DNA, 22 bp, Zea mays
caggctctcgtaaatgcgcctg

SEQ ID NO: 356 - protein, 350 aa, artificial sequence
  ZM6.3yeast
MNTKYNKEFLLYLAGFVDGDGSIKAQIKPEQSYKFKHRLRLTFQVTQKTQRRWFLDKLVDEIGVGYVYDRGSVSDYILSQIKPLHNFLTQLQPFLKLKQKQANLVLKIIEQLPSAKESPDKFLEVCTWVDQIAALNDSKTRKTTSETVRAVLDSLPGSVGGLSPSQASSAASSASSSPGSGISEALRAGATKSKEFLLYLAGFVDGDGSIMASIKPEQSYKFKHRLRLTFTVTQKTQRRWFLDKLVDEIGVGYVYDQGSVSHYRLSQIKPLHNFLTQLQPFLKLKQKQANLVLKIIEQLPSAKESPDKFLEVCTWVDQIAALNDSKTRKTTSETVRAVLDSLSEKKKSSP

SEQ ID NO: 357 - protein, 350 aa, artificial sequence
  ZM6.3(G1)
MNTKYNKEFLLYLAGFVDGDGSIKAQIKPEQRYKFKHRLRLTFQVTQKTRRRWILDKLVDEIGVGYVYDRGSVSDYILSRIKPLHNFLTQLQPFLKLKQKQANLVLKIIEQLPSAKESPDKFLEVCTWVDQIAALNDSKTRKTTSETVRAVLDSLPGSVGGLSPSQASSAASSASSSPGSGISEALRAGATKSKEFLLYLAGFVDGDGSIMASIKPEQSYKFKHRLRLTFTVTQKTQRRWFLDKLVDEIGVGYVYDQGSVSHYRLSQIKPLHNFLTQLQPFLKLKQKQANLVLKIIEQLPSAKESPDKFLEVCTWVDQIAALNDSKTRKTTSETVRAVLDSLSEKKKSSP

SEQ ID NO: 358 - protein, 350 aa, artificial sequence
  ZM6.3(G2)
MNTKYNKEFLLHLAGFVDGDGSIKAQIKPEQRYKFKHRLRLTFQVTQKTQRRWILLKLVDEIGVGYVYDRGSVSDYILSQIKPLHNFLTQLQPFLKLKQKQANLVLKIIEQLPSAKESPDKFLEVCTWVDQIAALNDSKTRKTTSETVRAVLDSLPGSVGGLSPSQASSAASSASSSPGSGISEALRAGATKSKEFLLYLAGFVDGDGSIMASIKPEQSYKFKHRLRLTFTVTQKTQRRWFLDKLVDEIGVGYVYDQGSVSHYRLSQIKPLHNFLTQLQPFLKLKQKQANLVLKIIEQLPSAKESPDKFLEVCTWVDQIAALNDSKTRKTTSETVRAVLDSLSEKKKSSP

SEQ ID NO: 359 - protein, 350 aa, artificial sequence
  ZM6.3(G3)
MNTKYNKEFLLYLAGFVDGDGSIKAQIKPEQSYKFKHRLRLTFQVTQKTRRRWILDKLVDEIGVGYVYDRGSVSDYILSQIKPLHNFLTQLQPFLKLKQKQANLVLKIIEQLPSAKESPDKFLEVCTWVDQIAALNDSKTRKTTSETVRAVLDSLPGSVGGLSPSQASSAASSASSSPGSGISEALRAGATKSKEFLLYLAGFVDGDGSIMASIKPEQSYKFKHRLRLTFTVTQKTQRRWFLDKLVDEIGVGYVYDQGSVSHYRLSQIKPLHNFLTQLQPFLKLKQKQANLVLKIIEQLPSAKESPDKFLEVCTWVDQIAALNDSKTRKTTSETVRAVLDSLSEKKKSSP

SEQ ID NO: 360 - protein, 350 aa, artificial sequence
  ZM6.3(G4)
MNTKYNKEFLLHLAGFVDGDGSIKAQIKPEQRYKFKHRLRLTFQVTQKTQRRWFLDKLVDEIGVGYVYDRGSVSDYILSQIKPLHNFLTQLQPFLKLKQKQANLVLKIIEQLPSAKESPDKFLRVCTWVDQIAALNDSKTRKTTSETVRAVLDSLPGSVGGLSPSQASSAASSASSSPGSGISEALRAGATKSKEFLLYLAGFVDGDGSIMASIKPEQSYKFKHRLRLTFTVTQKTQRRWFLDKLVDEIGVGYVYDQGSVSHYRLSQIKPLHNFLTQLQPFLKLKQKQANLVLKIIEQLPSAKESPDKFLEVCTWVDQIAALNDSKTRKTTSETVRAVLDSLSEKKKSSP

SEQ ID NO: 361 - protein, 350 aa, artificial sequence
  ZM6.3(G5)
MNTKYNKEFLLHLAGFVDGDGSIKAQIKPEQSYKFKHRLRLTFQVTQKTQRRWFLDKLVDEIGVGYVYDRGSASDYILSQIKPLHNFLTQLQPFLKLKQKQANLVLKIIEQLPSAKESPDKFLRVCTWVDQIAALNDSKTRKTTSETVRAVLDSLPGSVGGLSPSQASSAASSASSSPGSGISEALRAGATKSKEFLLYLAGFVDGDGSIMASIKPEQSYKFKHRLRLTFTVTQKTQRRWFLDKLVDEIGVGYVYDQGSVSHYRLSQIKPLHNFLTQLQPFLKLKQKQANLVLKIIEQLPSAKESPDKFLEVCTWVDQIAALNDSKTRKTTSETVRAVLDSLSEKKKSSP

SEQ ID NO: 362 - protein, 350 aa, artificial sequence
  ZM6.3(G6)
MNTKYNKEFLLYLAGFVDGDGSIKAQIKPEQSYKFKHRLRLTFQVTQKTQRRWILDELVDEIGVGYVYDRGSVSDYILSQIKPLHNFLTQLQPFLKLKQKQANLALKIIEQLPSAKESPDKFLRVCTWVDQIAALNDSKTRKTTSETVRAVLDSLPGSVGGLSPSQASSAASSASSSPGSGISEALRAGATKSKEFLLYLAGFVDGDGSIMASIKPEQSYKFKHRLRLTFTVTQKTRRRWFLDKLVDEIGVGYVYDQGSVSHYRLSQIKPLHNFLTQLQPFLKLKQKQANLVLKIIEQLPSAKESPDKFLEVCTWVDQIAALNDSKTRKTTSETVRAVLDSLSEKKKSSP

SEQ ID NO: 363 - protein, 350 aa, artificial sequence
  ZM6.3(H1)
MNTKYNKEFLLHLAGFVDGDGSIMAQIKPEQRYKFKHRLRLTFQVTQKTQRRWFLDKLVDEIGVGYVYDRGSVSDYILSQIKPLHNFLTQLQPFLKLKQKQANLVLKIIEQLPSAKESPDKFLRVCTWADQIAALNDSKTRKTTSETVRAVLDSLPGSVGGLSPSQASSAASSASSSPGSGISEALRAGATKSKEFLLYLAGFVDGDGSIMASIKPEQSYKFKHRLRLTFTVTQKTQRRWILDKLVDEIGVGYVYDQGSVSHYRLSQIKPLHNFLTQLQPFLKLKQKQANLVLKIIEQLPSAKESPDKFLRVCTWVDQIAALNDSKTRKTTSETVRAVLDSLSEKKKSSP

SEQ ID NO: 364 - protein, 350 aa, artificial sequence
  ZM6.3(H2)
MNTKYNKEFLLHLAGFVDGDGSIKAQIKPEQSYKFKHRLRLTFQVTQKTQRRWFLDKLVDEIGVGYVYDRGSVSDYILSQIKPLHNFLTQLQPFLKLKQKQANLALKIIEQLPSAKESPDKFLRVCTWVDQIAALNDSKTRKTTSETVRAVLDSLPGSVGGLSPSQASSAASSASSSPGSGISEALRAGATKSKEFLLYLAGFVDGDGSIMASIKPEQSYKFKHRLRLTFTVTQKTRRRWFLDKLVDEIGVGYVYDQGSVSHYRLSQIKPLHNFLTQLQPFLKLKQKQANLVLKIIEQLPSAKESPDKFLEVCTWVDQIAALNDSKTRKTTSETVRAVLLSLSEKKKSSP

SEQ ID NO: 365 - protein, 350 aa, artificial sequence
  ZM6.3(H3)
MNTKYNKEFLLHLAGFVDGDGSIKAQIKPEQSYKFKHRLRLTFQVTQKTRRRWFLDKLVDEIGVGYVYDRGSVSDYILSQIKPLHNFLTQLQPFLKLKQKQANLVLKIIEQLPSAKESPDKFLEVCTWVDQIAALNDSKTRKTTSETVRAVLDSLPGSVGGLSPSQASSAASSASSSPGSGISEALRAGATKSKEFLLYLAGFVDGDGSIMASIKPEQSYKFKHRLRLTFTVTQKTQRRWFLDKLVDEIGVGYVYDQGSVSHYRLSQIKPLHNFLTQLQPFLKLKQKQANLVLKIIEQLPSAKESPDKFLRVCTWVDQIAALNDSKTRKTTSETVRAVLDSLSEKKKSSP

SEQ ID NO: 366 - protein, 350 aa, artificial sequence
  ZM6.3(H5)
MNTKYNKEFLLHLAGFVDGDGSIKAQIKPEQSYKFKHRLRLTFQVTQKTQRRWILDKLVDEIGVGYVYDRGSVSDYILSQIKPLHNFLTQLQPFLKLKQKQANLALKIIEQLPSAKESPDKFLRVCTWVDQIAALNDSKTRKTTSETVRAVLDSLPGSVGGLSPSQASSAASSASSSPGSGISEALRAGATKSKEFLLYLAGFVDGDGSIMASIKPEQSYKFKHRLRLTFTVTQKTQRRWFLDKLVDEIGVGYVYDQGSVSHYRLSQIKPLHNFLTQLQPFLKLKQKQANLVLKIIEQLPSAKESPDKFLEVCTWVDQIAALNDSKTRKTTSETVRAVLDSLSEKKKSSP

SEQ ID NO: 367 - protein, 350 aa, artificial sequence
  ZM6.3(H6)
MNTKYNKEFLLHLAGFVDGDGSIKAQIKPEQRYKFKHRLRLTFQVTQKTQRRWILDKLVDEIGVGYVYDRGSVSDYILSQIKPLHNFLTQLQPFLKLKQKQANLVLKIIEQLPSAKESPDKFLEVCTWVDQIAALNDSKTRKTTSETVRAVLDSLPGSVGGLSPSQASSAASSASSSPGSGISEALRAGATKSKEFLLYLAGFVDGDGSIMASIKPEQSYKFKHRLRLTFTVTQKTQRRWFLDKLVDEIGVGYVYDQGSVSHYRLSQIKPLHNFLTQLQPFLKLKQKQANLVLKIIEQLPSAKESPDKFLEVCTWVDQIAALNDSKTRKTTSETVRAVLDSLSEKKKSSP

SEQ ID NO: 368 - protein, 350 aa, artificial sequence
  ZM6.3(1)
MNTKYNKEFLLYLAGFVDSDGSIKAQIKPEQSYKFNHRLRLTFQVTQKTQRRWFLDKLVDEIGVGYVYDRGSVSDYILSQIKPLHNFLTQLQPFLKLKQKQANLVLKIIEQLPSAKESPDKFLEVCTWVDQIAALNDSKTRKTTSETVRAVLDSLPGSVGGLSPSQASSAASSASSSPGSGVSEALRAGATKSKEFLLYLAGFVDGDGSIMASIKPEQSYKFKHRLRLTFTVTQKTQRRWFLDKLVDEIGVGYVYDQGSVSHYRLSQIKPLHNFLTQLQPFLKLKQKQANLVLKIIEQLPSAKESPDKFLEVCTWVDQIAALNDSKTRKTTSETVRAVLDSLSEKKKNSP

SEQ ID NO: 369 - protein, 350 aa, artificial sequence
  ZM6.3(3)
MNTKYNKEFLLYLAGFVDGDGSIKAQIKPEQSYKFKHRLRLTFQVTQKTQRRWFLDKLVDEIGVGYVYDRGSVSDYILSQIKPLHNFLTQLQPFLKLKQKQANLVLKIIEQLPSAKGSPDKFLEVCTWVDQIAALNDSKTRKTTSETVRAVLDSLPGSVGGLSPSQASSAASSASSSPGSGISEALRAGATKSKEFLLYLAGFVDGDGSIMASIKPEQSYKFKHRLRLTFTVTQKTQRRWFLDKLVDEIGVGYVYDQGSVSHYRLSQIKPLHNFLTQLQPFLKLKQKQANLVLKIIEQLPSAKESPDKFLEVCTWVDQIAALNDSKTRKTTSETVRAVLDSLSEKKKSSP

SEQ ID NO: 370 - protein, 350 aa, artificial sequence
  ZM6.3(4)
MNTKYNKEFLLYLAGFVDGDGSIKAQIKPEQSYKFKHRLRLTFQVTQKTQRRWFLDKLVDEIGVGYVYDRGSVSDYILSQIKPLHNFLTQLQPFLKLKQKQANLVLKIIEQLPSAKESPDKFLEVCTWVDQIAALNDSKTRKTTSETVRAVLDSLPGSVGGLSPSQASSAASSASSSPGSGISEALRAGATKSKEFLLYLAGFVDGDGSIMASIKPEQSYKFKHRLRLTFTVTQKTQRRWILDKLVDEIGVGYVYDQGSVSHYRLSQIKPLHNFLTQLQPFLKLKQKQANLVLKIIEQLPSAKESPDKFLEVCTWVDQIAALNDSKTRKTTSETVRAVLDSLSEKKKCSP

SEQ ID NO: 371 - protein, 350 aa, artificial sequence
  ZM6.3(5)
MNTKYNKEFLLYLAGFVDGDGSIKAQIKPEQSYKFKHRLRLTFQVTQKTQRRWFLDKLVDEVGVGYVYDRGSVSDYILSQIKPLHNFLTQLQPFLKLKQKQANLVLKIIEQLPSAKESPDKFLEVCTWVDQIAALNDSKTRKTTSESVRAVLDSLPGSVGGLSPSQASSAASSASSSPGSGISEALRAGATKSKEFLLYLAGVVDGDGSIMASIKPEQSYKFKHRLRLTFTVTQKTQRRWFLDKLVDEIGVGYVYDQGSVSHYRLSQIKPLHNFLTQLQPFLKLKQKQANLVLKIIEQLPSAKESPDKFLEVCTWADQIAALNDSKTRKTTSETVRAVLDSLSEKKKSSP

SEQ ID NO: 372 - DNA, 1050 bp, artificial sequence
  ZM6.3 yeast
atgaacaccaagtacaacaaggagttcctgctctacctggccggcttcgtggacggcgacggctccatcaaggcgcagatcaagccggagcagtcctacaagttcaagcaccgcctccgcctgaccttccaggtgacccagaagacgcagaggcgctggttcctcgacaagctggtcgacgagatcggggtgggctacgtctacgaccgcgggtcggtgtccgactacatcctctcccagatcaagcccctgcacaacttcctcacccagctccagccgttcctcaagctgaagcagaagcaggcgaacctcgtcctgaagatcatcgagcagctcccctcggccaaggagtccccggacaagttcctggaggtgtgcacgtgggtcgaccagatcgcggccctcaacgacagcaagacccgcaagacgacctcggagacggtgcgggcggtcctggactccctcccaggatccgtgggaggtctatcgccatctcaggcatccagcgccgcatcctcggcttcctcaagcccgggttcagggatctccgaagcactcagagctggagcaactaagtccaaagagtttttattatatttagcggggtttgtcgatggggatgggagtataatggccagtataaaacccgagcaatcttataaatttaaacatagattaaggttaacatttacggtcacgcaaaaaacccaacgtaggtggtttttagataaattagtggatgaaataggcgtcgggtatgtgtatgatcagggcagcgtcagtcattataggttaagtcaaataaaaccgttacataattttttaacgcaattacaaccctttttaaaattaaaacaaaaacaagccaatttagtgttaaaaataatagaacaattaccgagcgcgaaagaaagtcccgataaatttttagaagtctgtacctgggtggatcaaatagccgcgttaaatgattcaaaaacgaggaaaaccacgagcgaaaccgtcagagccgtgttagatagtttatcagaaaagaagaaaagcagtccg

SEQ ID NO: 373 - DNA, 1050 bp, artificial sequence
  ZM6.3(G1)
atgaacaccaagtacaacaaggagttcctgctctacctggccggcttcgtggacggcgacggctccatcaaggcgcagatcaagccggagcagaggtacaagttcaagcaccgcctccgcctgaccttccaggtgacccagaagacgagaaggcgctggatcctcgataagctggtcgacgagatcggggtgggctacgtctacgaccgcgggtcggtgtccgactacatcctctccagaatcaagcccctgcacaacttcctcacccagctccagccgttcctcaagctgaagcagaagcaggcgaacctcgtcctgaagatcatcgagcagctcccctcggccaaggagtccccggacaagttcctggaggtgtgcacgtgggtggaccagatcgcggccctcaacgacagcaagacccgcaagacgacctcggagacggtgcgggcggtcctggactccctcccaggatccgtgggaggtctatcgccatctcaggcatccagcgccgcatcctcggcttcctcaagcccgggttcagggatctccgaagcactcagagctggagcaactaagtccaaagagtttttattatatttagcggggtttgtcgatggggatgggagtataatggccagtataaaacccgagcaatcttataaatttaaacatagattaaggttaacatttacggtcacgcaaaaaacccaacgtaggtggtttttagataaattagtggatgaaataggcgtcgggtatgtgtatgatcagggcagcgtcagtcattataggttaagtcaaataaaaccgttacataattttttaacgcaattacaaccctttttaaaattaaaacaaaaacaagccaatttagtgttaaaaataatagaacaattaccgagcgcgaaagaaagtcccgataaatttttagaagtctgtacctgggtggatcaaatagccgcgttaaatgattcaaaaacgaggaaaaccacgagcgaaaccgtcagagccgtgttagatagtttatcagaaaagaagaaaagcagtccg

SEQ ID NO: 374 - DNA, 1050 bp, artificial sequence
  ZM6.3(G2)
atgaacaccaagtacaacaaggagttcctgctccatctggccggcttcgtggacggcgacggctccatcaaggcgcagatcaagccggagcagaggtacaagttcaagcaccgcctccgcctgaccttccaggtgacccagaagacgcagaggcgctggatcctcttaaagctggtcgacgagatcggggtgggctacgtctacgaccgcgggtcggtgtccgactacatcctctcccagatcaagcccctgcacaacttcctcacccagctccagccgttcctcaagctgaagcagaagcaggcgaacctcgtcctgaagatcatcgagcagctcccctcggccaaggagtccccggacaagttcctggaggtgtgcacgtgggtcgaccagatcgcggccctcaacgacagcaagacccgcaagacgacctcggagacggtgcgggcggtcctggactccctcccaggatccgtgggaggtctatcgccatctcaggcatccagcgccgcatcctcggcttcctcaagcccgggttcagggatctccgaagcactcagagctggagcaactaagtccaaagagtttttattatatttagcggggtttgtcgatggggatgggagtataatggccagtataaaacccgagcaatcttataaatttaaacatagattaaggttaacatttacggtcacgcaaaaaacccaacgtaggtggtttttagataaattagtggatgaaataggcgtcgggtatgtgtatgatcagggcagcgtcagtcattataggttaagtcaaataaaaccgttacataattttttaacgcaattacaaccctttttaaaattaaaacaaaaacaagccaatttagtgttaaaaataatagaacaattaccgagcgcgaaagaaagtcccgataaatttttagaagtctgtacctgggtggatcaaatagccgcgttaaatgattcaaaaacgaggaaaaccacgagcgaaaccgtcagagccgtgttagatagtttatcagaaaagaagaaaagcagtccg

SEQ ID NO: 375 - DNA, 1050 bp, artificial sequence
  ZM6.3(G3
atgaacaccaagtacaacaaggagttcctgctctacctggccggcttcgtggacggcgacggctccatcaaggcgcagatcaagccggagcagtcctacaagttcaagcaccgcctccgcctgaccttccaggtgacccagaagacgagaaggcgctggatcctcgacaagctggtcgacgagatcggggtgggctacgtctacgaccgcgggtcggtgtccgactacatcctctcccagatcaagcccctgcacaacttcctcacccagctccagccgttcctcaagctgaagcagaagcaggcgaacctcgtcctgaagatcatcgagcagctcccctcggccaaggagtccccggacaagttcctggaggtgtgcacgtgggtggaccagatcgcggccctcaacgacagcaagacccgcaagacgacctcggagacggtgcgggcggtcctggactccctcccaggatccgtgggaggtctatcgccatctcaggcatccagcgccgcatcctcggcttcctcaagcccgggttcagggatctccgaagcactcagagctggagcaactaagtccaaagagtttttattatatttagcggggtttgtcgatggggatgggagtataatggccagtataaaacccgagcaatcttataaatttaaacatagattaaggttaacatttacggtcacgcaaaaaacccaacgtaggtggtttttagataaattagtggatgaaataggcgtcgggtatgtgtatgatcagggcagcgtcagtcattataggttaagtcaaataaaaccgttacataattttttaacgcaattacaaccctttttaaaattaaaacaaaaacaagccaatttagtgttaaaaataatagaacaattaccgagcgcgaaagaaagtcccgataaatttttagaagtctgtacctgggtggatcaaatagccgcgttaaatgattcaaaaacgaggaaaaccacgagcgaaaccgtcagagccgtgttagatagtttatcagaaaagaagaaaagcagtccg

SEQ ID NO: 376 - DNA, 1050 bp, artificial sequence
  ZM6.3(G4)
atgaacaccaagtacaacaaggagttcctgctccatctggccggcttcgtggacggcgacggctccatcaaggcgcagatcaagccggagcagaggtacaagttcaagcaccgcctccgcctgaccttccaggtgacccagaagacgcagaggcgctggttcctcgacaagctggtcgacgagatcggggtgggctacgtctacgaccgcgggtcggtgtccgactacatcctctcccagatcaagcccctgcacaacttcctcacccagctccagccgttcctcaagctgaagcagaagcaggcgaacctcgtcctgaagatcatcgagcagctcccctcggccaaggagtccccggacaagttcctgagagtgtgcacgtgggtcgaccagatcgcggccctcaacgacagcaagacccgcaagacgacctcggagacggtgcgggcggtcctggactccctcccaggatccgtgggaggtctatcgccatctcaggcatccagcgccgcatcctcggcttcctcaagcccgggttcagggatctccgaagcactcagagctggagcaactaagtccaaagagtttttattatatttagcggggtttgtcgatggggatgggagtataatggccagtataaaacccgagcaatcttataaatttaaacatagattaaggttaacatttacggtcacgcaaaaaacccaacgtaggtggtttttagataaattagtggatgaaataggcgtcgggtatgtgtatgatcagggcagcgtcagtcattataggttaagtcaaataaaaccgttacataattttttaacgcaattacaaccctttttaaaattaaaacaaaaacaagccaatttagtgttaaaaataatagaacaattaccgagcgcgaaagaaagtcccgataaatttttagaagtctgtacctgggtggatcaaatagccgcgttaaatgattcaaaaacgaggaaaaccacgagcgaaaccgtcagagccgtgttagatagtttatcagaaaagaagaaaagcagtccg

SEQ ID NO: 377 - DNA, 1050 bp, artificial sequence
  ZM6.3(G5)
atgaacaccaagtacaacaaggagttcctgctccatctggccggcttcgtggacggcgacggctccatcaaggcgcagatcaagccggagcagtcctacaagttcaagcaccgcctccgcctgaccttccaggtgacccagaagacgcagaggcgctggttcctcgacaagctggtcgacgagatcggggtgggctacgtctacgaccgcgggtcggcttccgactacatcctctcccagatcaagcccctgcacaacttcctcacccagctccagccgttcctcaagctgaagcagaagcaggcgaacctcgtcctgaagatcatcgagcagctcccctcggccaaggagtccccggacaagttcctgagagtgtgcacgtgggtcgaccagatcgcggccctcaacgacagcaagacccgcaagacgacctcggagacggtgcgggcggtcctggactccctcccaggatccgtgggaggtctatcgccatctcaggcatccagcgccgcatcctcggcttcctcaagcccgggttcagggatctccgaagcactcagagctggagcaactaagtccaaagagtttttattatatttagcggggtttgtcgatggggatgggagtataatggccagtataaaacccgagcaatcttataaatttaaacatagattaaggttaacatttacggtcacgcaaaaaacccaacgtaggtggtttttagataaattagtggatgaaataggcgtcgggtatgtgtatgatcagggcagcgtcagtcattataggttaagtcaaataaaaccgttacataattttttaacgcaattacaaccctttttaaaattaaaacaaaaacaagccaatttagtgttaaaaataatagaacaattaccgagcgcgaaagaaagtcccgataaatttttagaagtctgtacctgggtggatcaaatagccgcgttaaatgattcaaaaacgaggaaaaccacgagcgaaaccgtcagagccgtgttagatagtttatcagaaaagaagaaaagcagtccg

SEQ ID NO: 378 - DNA, 1050 bp, artificial sequence
  ZM6.3(G6)
atgaacaccaagtacaacaaggagttcctgctctacctggccggcttcgtggacggcgacggctccatcaaggcgcagatcaagccggagcagtcctacaagttcaagcaccgcctccgcctgaccttccaggtgacccagaagacgcagaggcgctggatcctcgatgagctggtcgacgagatcggggtgggctacgtctacgaccgcgggtcggtgtccgactacatcctctcccagatcaagcccctgcacaacttcctcacccagctccagccgttcctcaagctgaagcagaagcaggcgaacctcgcgctgaagatcatcgagcagctcccctcggccaaggagtccccggacaagttcctgagagtgtgcacgtgggtggaccagatcgcggccctcaacgacagcaagacccgcaagacgacctcggagacggtgcgggcggtcctggactccctcccaggatccgtgggaggtctatcgccatctcaggcatccagcgccgcatcctcggcttcctcaagcccgggttcagggatctccgaagcactcagagctggagcaactaagtccaaagagtttttattatatttagcggggtttgtcgatggggatgggagtataatggccagtataaaacccgagcaatcttataaatttaaacatagattaaggttaacatttacggtcacgcaaaaaaccagacgtaggtggtttttagataaattagtggatgaaataggcgtcgggtatgtgtatgatcagggcagcgtcagtcattataggttaagtcaaataaaaccgttacataattttttaacgcaattacaaccctttttaaaattaaaacaaaaacaagccaatttagtgttaaaaataatagaacaattaccgagcgcgaaagaaagtcccgataaatttttagaagtctgtacctgggtggatcagatagccgcgttaaatgattcaaaaacgaggaaaaccacgagcgaaaccgtcagagccgtgttagatagtttatcagaaaagaagaaaagcagtccg

SEQ ID NO: 379 - DNA, 1050 bp, artificial sequence
  ZM6.3(H1)
atgaacaccaagtacaacaaggagttcctgctccatctggccggcttcgtggacggcgacggctccatcatggcgcagatcaagccggagcagaggtacaagttcaagcaccgcctccgcctgaccttccaggtgacccagaagacgcagaggcgctggttcctcgataagctggtcgacgagatcggggtgggctacgtctacgaccgcgggtcggtgtccgactacatcctctcccagatcaagcccctgcacaacttcctcacccagctccagccgttcctcaagctgaagcagaagcaggcgaacctcgtcctgaagatcatcgagcagctcccctcggccaaggagtccccggacaagttcctgagagtgtgcacgtgggcggaccagatcgcggccctcaacgacagcaagacccgcaagacgacctcggagacggtgcgggcggtcctggactccctcccaggatccgtgggaggtctatcgccatctcaggcatccagcgccgcatcctcggcttcctcaagcccgggttcagggatctccgaagcactcagagctggagcaactaagtccaaagagtttttattatatttagcggggtttgtcgatggggatgggagtataatggccagtataaaacccgagcaatcttataaatttaaacatagattaaggttaacatttacggtcacgcaaaaaacccagcgtaggtggatcttagataaattagtggatgaaataggcgtcgggtatgtgtatgatcagggcagcgtcagtcattataggttaagtcaaataaaaccgttacataattttttaacgcaattacaaccctttttaaaattaaaacaaaaacaagccaatttagtgttaaaaataatagaacaattaccgagcgcgaaagaaagtcccgataaatttttaagagtctgtacctgggtggatcagatagccgcgttaaatgattcaaaaacgaggaaaaccacgagcgaaaccgtcagagccgtgttagatagtttatcagaaaagaagaaaagcagtccg

SEQ ID NO: 380 - DNA, 1050 bp, artificial sequence
  ZM6.3(H2)
atgaacaccaagtacaacaaggagttcctgctccatctggccggcttcgtggacggcgacggctccatcaaggcgcagatcaagccggagcagtcctacaagttcaagcaccgcctccgcctgaccttccaggtgacccagaagacgcagaggcgctggttcctcgacaagctggtcgacgagatcggggtgggctacgtctacgaccgcgggtcggtgtccgactacatcctctcccagatcaagcccctgcacaacttcctcacccagctccagccgttcctcaagctgaagcagaagcaggcgaacctcgcgctgaagatcatcgagcagctcccctcggccaaggagtccccggacaagttcctgagagtgtgcacgtgggtcgaccagatcgcggccctcaacgacagcaagacccgcaagacgacctcggagacggtgcgggcggtcctggactccctcccaggatccgtgggaggtctatcgccatctcaggcatccagcgccgcatcctcggcttcctcaagcccgggttcaggaatctccgaagcactcagagctggagcaactaagtccaaagagtttttattatatttagcggggtttgtcgatggggatgggagtataatggccagtataaaacccgagcaatcttataaatttaaacatagattaaggttaacatttacggtcacgcaaaaaaccagacgtaggtggttcttagataaattagtggatgaaataggcgtcgggtatgtgtatgatcagggcagcgtcagtcattataggttaagtcaaataaaaccgttacataattttttaacgcaattacaaccctttttaaaattaaaacaaaaacaagccaatttagtgttaaaaataatagaacaattaccgagcgcgaaagaaagtcccgataaatttttagaagtctgtacctgggtggatcaaatagccgcgttaaatgattcaaaaacgaggaaaaccacgagcgaaaccgtcagagccgtgttattaagtttatcagaaaagaagaaaagcagtccg

SEQ ID NO: 381 - DNA, 1050 bp, artificial sequence
  ZM6.3(H3)
atgaacaccaagtacaacaaggagttcctgctccatctggccggcttcgtggacggcgacggctccatcaaggcgcagatcaagccggagcagtcctacaagttcaagcaccgcctccgcctgaccttccaggtgacccagaagacgagaaggcgctggttcctcgacaagctggtcgacgagatcggggtgggctacgtctacgaccgcgggtcggtgtccgactacatcctctcccagatcaagcccctgcacaacttcctcacccagctccagccgttcctcaagctgaagcagaagcaggcgaacctcgtcctgaagatcatcgagcagctcccctcggccaaggagtccccggacaagttcctggaggtgtgcacgtgggtcgaccagatcgcggccctcaacgacagcaagacccgcaagacgacctcggagacggtgcgggcggtcctggactccctcccaggatccgtgggaggtctatcgccatctcaggcatccagcgccgcatcctcggcttcctcaagcccgggttcagggatctccgaagcactcagagctggagcaactaagtccaaagagtttttattatatttagcggggtttgtcgatggggatgggagtataatggccagtataaaacccgagcaatcttataaatttaaacatagattaaggttaacatttacggtcacgcaaaaaacccaacgtaggtggtttttagataaattagtggatgaaataggcgtcgggtatgtgtatgatcagggcagcgtcagtcattataggttaagtcaaataaaaccgttacataattttttaacgcaattacaaccctttttaaaattaaaacaaaaacaagccaatttagtgttaaaaataatagaacaattaccgagcgcgaaagaaagtcccgataaatttttaagagtctgtacctgggtggatcagatagccgcgttaaatgattcaaaaacgaggaaaaccacgagcgaaaccgtcagagccgtgttagatagtttatcagaaaagaagaaaagcagtccg

SEQ ID NO: 382 - DNA, 1050 bp, artificial sequence
  ZM6.3(H4)
atgaacaccaagtacaacaaggagttcctgctccatctggccggcttcgtggacggcgacggctccatcaaggcgcagatcaagccggagcagtcctacaagttcaagcaccgcctccgcctgaccttccaggtgacccagaagacgcagaggcgctggatcctcgataagctggtcgacgagatcggggtgggctacgtctacgaccgcgggtcggtgtccgactacatcctctcccagatcaagcccctgcacaacttcctcacccagctccagccgttcctcaagctgaagcagaagcaggcgaacctcgcgctgaagatcatcgagcagctcccctcggccaaggagtccccggacaagttcctgagagtgtgcacgtgggtcgaccagatcgcggccctcaacgacagcaagacccgcaagacgacctcggagacggtgcgggcggtcctggactccctcccaggatccgtgggaggtctatcgccatctcaggcatccagcgccgcatcctcggcttcctcaagcccgggttcagggatctccgaagcactcagagctggagcaactaagtccaaagagtttttattatatttagcggggtttgtcgatggggatgggagtataatggccagtataaaacccgagcaatcttataaatttaaacatagattaaggttaacatttacggtcacgcaaaaaacccaacgtaggtggtttttagataaattagtggatgaaataggcgtcgggtatgtgtatgatcagggcagcgtcagtcattataggttaagtcaaataaaaccgttacataattttttaacgcaattacaaccctttttaaaattaaaacaaaaacaagccaatttagtgttaaaaataatagaacaattaccgagcgcgaaagaaagtcccgataaatttttagaagtctgtacctgggtggatcaaatagccgcgttaaatgattcaaaaacgaggaaaaccacgagcgaaaccgtcagagccgtgttagatagtttatcagaaaagaagaaaagcagtccg

SEQ ID NO: 383 - DNA, 1050 bp, artificial sequence
  ZM6.3(H6)
atgaacaccaagtacaacaaggagttcctgctccatctggccggcttcgtggacggcgacggctccatcaaggcgcagatcaagccggagcagaggtacaagttcaagcaccgcctccgcctgaccttccaggtgacccagaagacgcagaggcgctggatcctcgataagctggtcgacgagatcggggtgggctacgtctacgaccgcgggtcggtgtccgactacatcctctcccagatcaagcccctgcacaacttcctcacccagctccagccgttcctcaagctgaagcagaagcaggcgaacctcgtcctgaagatcatcgagcagctcccctcggccaaggagtccccggacaagttcctggaggtgtgcacgtgggtcgaccagatcgcggccctcaacgacagcaagacccgcaagacgacctcggagacggtgcgggcggtcctggactccctcccaggatccgtgggaggtctatcgccatctcaggcatccagcgccgcatcctcggcttcctcaagcccgggttcagggatctccgaagcactcagagctggagcaactaagtccaaagagtttttattatatttagcggggtttgtcgatggggatgggagtataatggccagtataaaacccgagcaatcttataaatttaaacatagattaaggttaacatttacggtcacgcaaaaaacccaacgtaggtggtttttagataaattagtggatgaaataggcgtcgggtatgtgtatgatcagggcagcgtcagtcattataggttaagtcaaataaaaccgttacataattttttaacgcaattacaaccctttttaaaattaaaacaaaaacaagccaatttagtgttaaaaataatagaacaattaccgagcgcgaaagaaagtcccgataaatttttagaagtctgtacctgggtggatcaaatagccgcgttaaatgattcaaaaacgaggaaaaccacgagcgaaaccgtcagagccgtgttagatagtttatcagaaaagaagaaaagcagtccg

SEQ ID NO: 384 - DNA, 1050 bp, artificial sequence
  ZM6.3(1)
atgaacaccaagtacaacaaggagttcctgctctacctggccggcttcgtggacagcgacggctccatcaaggcgcagatcaagccggagcagtcctacaagttcaaccaccgcctccgcctgaccttccaggtgacccagaagacgcagaggcgctggttcctcgacaagctggtcgacgagatcggggtgggctacgtctacgaccgcgggtcggtgtccgactacatcctctcccagatcaagcccctgcacaacttcctcacccagctccagccgttcctcaagctgaagcagaagcaggcgaacctcgtcctgaagatcatcgagcagctcccctcggccaaggagtccccggacaagttcctggaggtgtgcacgtgggtcgaccagatcgcggccctcaacgacagcaagacccgcaagacgacctcggagacggtgcgggcggtcctggactccctcccaggatccgtgggaggtctatcgccatctcaggcatccagcgccgcatcctcggcttcctcaagcccgggttcaggggtctccgaagcactcagagctggagcaactaagtccaaagagtttttattatatttagcggggtttgtcgatggggatgggagtataatggccagtataaaacccgagcaatcttataaatttaaacatagattaaggttaacatttacggtcacgcaaaaaacccaacgtaggtggtttttagataaattagtggatgaaataggcgtcgggtatgtgtatgatcagggcagcgtcagtcattataggttaagtcaaataaaaccgttacataattttttaacgcaattacaaccctttttaaaattaaaacaaaaacaagccaatttagtgttaaaaataatagaacaattaccgagcgcgaaagaaagtcccgataaatttttagaagtctgtacctgggtggatcaaatagccgcgttaaatgattcaaaaacgaggaaaaccacgagcgaaaccgtcagagccgtgttagatagtttatcagaaaagaagaagaacagtccg

SEQ ID NO: 385 - DNA, 1050 bp, artificial sequence
  ZM6.3(3)
atgaacaccaagtacaacaaggagttcctgctctacctggccggcttcgtggacggcgacggctccatcaaggcgcagatcaagccggagcagtcctacaagttcaagcaccgcctccgcctgaccttccaggtgacccagaagacgcagaggcgctggttcctcgacaagctggtcgacgagatcggggtgggctacgtctacgaccgcgggtcggtgtccgactacatcctctcccagatcaagcccctgcacaacttcctcacccagctccagccgttcctcaagctgaagcagaagcaggcgaacctcgtcctgaagatcatcgagcagctcccctcggccaaggggtccccggacaagttcctggaggtgtgcacgtgggtcgaccagatcgcggccctcaacgacagcaagacccgcaagacgacctcggagacggtgcgggcagtcctggactccctcccaggatccgtgggaggtctatcgccatctcaggcatccagcgccgcatcctcggcttcctcaagcccgggttcagggatctccgaagcactcagagctggagcaactaagtccaaagagtttttattatatttagcggggtttgtcgatggggatgggagtataatggccagtataaaacccgagcaatcttataaatttaaacatagattaaggttaacatttacggtcacgcaaaaaacccaacgtaggtggtttttagataaattagtggatgaaataggcgtcgggtatgtgtatgatcagggcagcgtcagtcattataggttaagtcaaataaaaccgttacataattttttaacgcaattacaaccctttttaaaattaaaacaaaaacaagccaatttagtgttaaaaataatagaacaattaccgagcgcgaaagaaagtcccgataaatttttagaagtctgtacctgggtggatcaaatagccgcgttaaatgattcaaaaacgaggaaaaccacgagcgaaaccgtcagagccgtgttagatagtttatcagaaaagaagaaaagcagtccg

SEQ ID NO: 386 - DNA, 1050 bp, artificial sequence
  ZM6.3(4)
atgaacaccaagtacaacaaggagttcctgctctacctggccggcttcgtggacggcgacggctccatcaaggcgcagatcaagccggagcagtcctacaagttcaagcaccgcctccgcctgaccttccaggtgacccagaagacgcagaggcgctggttcctcgacaagctggtcgacgagatcggggtgggctacgtctacgaccgcgggtcggtgtccgactacatcctctcccagatcaagcccctgcacaacttcctcacccagctccagccgttcctcaagctgaagcagaagcaggcgaacctcgtcctgaagatcatcgagcagctcccctcggccaaggagtccccggacaagttcctggaggtgtgcacgtgggtcgaccagatcgcggccctcaacgacagcaagacccgcaagacgacctcggagacggtgcgggcggtcctggactccctcccaggatccgtgggaggtctatcgccatctcaggcatccagcgccgcatcctcggcttcctcaagcccgggttcagggatctccgaagcactcagagctggagcaactaagtccaaagagtttttattatatttagcggggtttgtcgatggggatgggagtataatggccagtataaaacccgagcaatcttataaatttaaacatagattaaggttaacatttacggtcacgcaaaaaacccaacgtaggtggattttagataaattagtggatgaaataggcgtcgggtatgtgtatgatcagggcagcgtcagtcattataggttaagtcaaataaaaccgttacataattttttaacgcaattacaaccctttttaaaattaaaacaaaaacaagccaatttagtgttaaaaataatagaacaattaccgagcgcgaaagaaagtcccgataaatttttagaagtctgtacctgggtggatcaaatagccgcgttaaatgattcaaaaacgaggaaaaccacgagcgaaaccgtcagagccgtgttagatagtttatcagaaaagaagaaatgcagtccg

SEQ ID NO: 387 - DNA, 1050 bp, artificial sequence
  ZM6.3(5)
atgaacaccaagtacaacaaggagttcctgctctacctggccggcttcgtggacggcgacggctccatcaaggcgcagatcaagccggagcagtcctacaagttcaagcaccgcctccgcctgaccttccaggtgacccagaagacgcagaggcgctggttcctcgacaagctggtcgacgaggtcggggtgggctacgtctacgaccgcgggtcggtgtccgactacatcctctcccagatcaagcccctgcacaacttcctcacccagctccagccgttcctcaagctgaagcagaagcaggcgaacctcgtcctgaagatcatcgagcagctcccctcggccaaggagtccccggacaagttcctggaggtgtgcacgtgggtcgaccagatcgcggccctcaacgacagcaagacccgcaagacgacctcggagtcggtgcgggcggtcctggactccctcccaggatccgtgggaggtctatcgccatctcaggcatccagcgccgcatcctcggcttcctcaagcccgggttcagggatctccgaagcactcagagctggagcaactaagtccaaagagtttttattatatttagcgggggttgtcgatggggatgggagtataatggccagtataaaacccgagcaatcttataaatttaaacatagattaaggttaacatttacggtcacgcaaaaaacccaacgtaggtggtttttagataaattagtggatgaaataggcgtcgggtatgtgtatgatcagggcagcgtcagtcattataggttaagtcaaataaaaccgttacataattttttaacgcaattacaaccctttttaaaattaaaacaaaaacaagccaatttagtgttaaaaataatagaacaattaccgagcgcgaaagaaagtcccgataaatttttagaagtctgtacctgggcggatcaaatagccgcgttaaatgattcaaaaacgaggaaaaccacgagcgaaaccgtcagagccgtgttagatagtttatcagaaaagaagaaaagcagtccg

SEQ ID NO: 388 - DNA, 22 bp, zea mays
attgctctctcacatactttta

SEQ ID NO: 389 - protein, 350 aa, artificial sequence
  ZM6.22v2(yeast)
MNTKYNKEFLLYLAGFVDGDGSIKAQIKPQQSCKFKHALRLTFQVTQKTQRRWFLDKLVDEIGVGYVYDRGSVSDYILSEIKPLHNFLTQLQPFLKLKQKQANLVLKIIEQLPSAKESPDKFLEVCTWVDQIAALNDSKTRKTTSETVRAVLDSLPGSVGGLSPSQASSAASSASSSPGSGISEALRAGATKSKEFLLYLAGFVDGDGSIIASIKPNQCYKFKHQLSLTFTVTQKTQRRWFLDKLVDEIGVGYVYDQGSVSHYRLSQIKPLHNFLTQLQPFLKLKQKQANLVLKIIEQLPSAKESPDKFLEVCTWVDQIAALNDSKTRKTTSETVRAVLDSLSEKKKSSP

SEQ ID NO: 390 - protein, 350 aa, artificial sequence
  ZM6.22v2(J2)
MNTKYNKEFLLHLAGFVDGDGSIKAQIKPQQSCKFKHALRLTFQVTQKTQRRWFLDKLVDEIGVGYVYDRGSVSDYILSEIKPLHNFLTQLQPFLKLKQKQANLVLKIIEQLPSAKESPDKFLRVCTWVDQIAALNDSKTRKTTSETVRAVLDSLPGSVGGLSPSQASSAASSASSSPGSGISEALRAGATKSKEFLLYLAGFVDGDGSIIASIKPNQCYKFKHQLSLTFTVTQKTQRRWFLDKLVDEIGVGYVYDQGSVSHYRLSQIKPLHNFLTQLQPFLKLKQKQANLVLKIIEQLPSAKESPDKFLEVCTWVDQIAALNDSKTRKTTSETVRAVLDSLSEKKKSSP

SEQ ID NO: 391 - protein, 350 aa, artificial sequence
  ZM6.22v2(J3)
MNTKYNKEFLLYLAGFVDGDGSIKAQIKPQQSCKFKHALRLTFQVTQKTRRRWFLLKLVDEIGVGYVYDRGSVSDYILSEIKPLHNFLTQLQPFLKLKQKQANLVLKIIEQLPSAKESPDKFLEVCTWVDRIAALNDSKTRKTTSETVRAVLDSLPGSVGGLSPSQASSAASSASSSPGSGISEALRAGATKSKEFLLYLAGFVDGDGSIIASIKPNQCYKFKHQLSLTFTVTQKTRRRWFLDKLVDEIGVGYVYDQGSVSHYRLSQIKPLHNFLTQLQPFLKLKQKQANLVLKIIEQLPSAKESPDKFLRVCTWADRIAALNDSKTRKTTSETVRAVLDSLSEKKKSSP

SEQ ID NO: 392 - protein, 350 aa, artificial sequence
  ZM6.22v2(J4)
MNTKYNKEFLLHLAGFVDGDGSIKAQIKPQQSCKFKHALRLTFQVTQKTQRRWFLDKLVDEIGVGYVYDRGSVSDYILSEIKPLHNFLTQLQPFLKLKQKQANLVLKIIEQLPSAKESPDKFLEVCTWVDQIAALNDSKTRKTTSETVRAVLDSLPGSVGGLSPSQASSAASSASSSPGSGISEALRAGATKSKEFLLYLAGFVDGDGSIIASIKPNQCYKFKHQLSLTFTVTQKTRRRWFLDKLVDEIGVGYVYDQGSVSHYRLSQIKPLHNFLTQLQPFLKLKQKQANLVLKIIEQLPSAKESPDKFLEVCTWVDRIAALNDSKTRKTTSETVRAVLDSLSEKKKSSP

SEQ ID NO: 393 - protein, 350 aa, artificial sequence
  ZM6.22v2(J5)
MNTKYNKEFLLHLAGFVDGDGSIKAQIKPQQSCKFKHALRLTFQVTQKTQRRWFLDKLVDEIGVGYVYDRGSVSDYILSEIKPLHNFLTQLQPFLKLKQKQANLALKIIEQLPSAKESPDKFLRVCTWVDQIAALNDSKTRKTTSETVRAVLLSLPGSVGGLSPSQASSAASSASSSPGSGISEALRAGATKSKEFLLYLAGFVDGDGSIIASIKPNQCYKFKHQLSLTFTVTQKTQRRWFLDKLVDEIGVGYVYDQGSVSHYRLSQIKPLHNFLTQLQPFLKLKQKQANLVLKIIEQLPSAKESPDKFLRVCTWVDQIAALNDSKTRKTTSETVRAVLDSLSEKKKSSP

SEQ ID NO: 394 - protein, 350 aa, artificial sequence
  ZM6.22v2(I2)
MNTKYNKEFLLHLAGFVDGDGSIKAQIKPQQSCKFKHALRLTFQVTQKTRRRWFLDKLVDEIGVGYVYDRGSVSDYILSEIKPLHNFLTQLQPFLKLKQKQANLVLKIIEQLPSAKESPDKFLRVCTWADRIAALNDSKTRKTTSETVRAVLDSLPGSVGGLSPSQASSAASSASSSPGSGISEALRAGATKSKEFLLYLAGFVDGDGSIMASIKPNQCYKFKHQLSLTFTVTQKTQRRWFLDKLVDEIGVGYVYDQGSVSHYRLSQIKPLHNFLTQLQPFLKLKQKQANLVLKIIEQLPSAKESPDKFLRVCTWADRIAALNDSKTRKTTSETVRAVLDSLSEKKKSSP

SEQ ID NO: 395 - protein, 350 aa, artificial sequence
  ZM6.22v2(I3)
MNTKYNKEFLLHLAGFVDGDGSIKAQIKPQQSCKFKHALRLTFQVTQKTQRRWFLDKLVDEIGVGYVYDRGSVSDYILSEIKPLHNFLTQLQPFLKLKQKQANLVLKIIEQLPSAKESPDKFLEVCTWVDQIAALNDSKTRKTTSETVRAVLDSLPGSVGGLSPSQASSAASSASSSPGSGISEALRAGATKSKEFLLYLAGFVDGDGSIIASIKPNQCYKFKHQLSLTFTVTQKTQRRWFLDKLVDEIGVGYVYDQGSVSHYRLSQIKPLHNFLTQLQPFLKLKQKQANLVLKIIEQLPSAKESPDKFLRVCTWVDQIAALNDSKTRKTTSETVRAVLDSLSEKKKSSP

SEQ ID NO: 396 - protein, 350 aa, artificial sequence
  ZM6.22v2(I4)
MNTKYNKEFLLYLAGFVDGDGSIKAQIKPQQSCKFKHALRLTFQVTQKTQRRWFLDELVDEIGVGYVYDRGSVSDYILSEIKPLHNFLTQLQPFLKLKQKQANLVLKIIEQLPSAKESPDKFLRVCTWVDQIAALNDSKTRKTTSETVRAVLDSLPGSVGGLSPSQASSAASSASSSPGSGISEALRAGATKSKEFLLYLAGFVDGDGSIIASIKPNQCYKFKHQLSLTFTVTQKTQRRWFLDKLVDEIGVGYVYDQGSVSHYRLSQIKPLHNFLTQLQPFLKLKQKQANLALKIIEQLPSAKESPDKFLEVCTWADRIAALNDSKTRKTTSETVRAVLDSLSEKKKSSP

SEQ ID NO: 397 - protein, 350 aa, artificial sequence
  ZM6.22v2(I5)
MNTKYNKEFLLYLAGFVDGDGSIKAQIKPQQSCKFKHALRLTFQVTQKTQRRWFLDKLVDEIGVGYVYDRGSVSDYILSEIKPLHNFLTQLQPFLKLKQKQANLVLKIIEQLPSAKESPDKFLEVCTWVDQIAALNDSKTRKTTSETVRAVLDSLPGSVGGLSPSQASSAASSASSSPGSGISEALRAGATKSKEFLLYLAGFVDGDGSIIASIKPNQCYKFKHQLSLTFTVTQKTRRRWFLDKLVDEIGVGYVYDQGSVSHYRLSQIKPLHNFLTQLQPFLKLKQKQANLVLKIIEQLPSAKESPDKFLEVCTWVDQIAALNDSKTRKTTSETVRAVLDSLSEKKKSSP

SEQ ID NO: 398 - protein, 350 aa, artificial sequence
  ZM6.22v2(I6)
MNTKYNKEFLLHLAGFVDGDGSIKAQIKPQQSCKFKHALRLTFQVTQKTQRRWFLLELVDEIGVGYVYDRGSVSDYILSEIKPLHNFLTQLQPFLKLKQKQANLALKIIEQLPSAKESPDKFLEVCTWVDQIAALNDSKTRKTTSETVRAVLDSLPGSVGGLSPSQASSAASSASSSPGSGISEALRAGATKSKEFLLYLAGFVDGDGSIIASIKPNQCYKFKHQLSLTFTVTQKTQRRWFLDKLVDEIGVGYVYDQGSVSHYRLSQIKPLHNFLTQLQPFLKLKQKQANLVLKIIEQLPSAKESPDKFLEVCTWADRIAALNDSKTRKTTSETVRAVLDSLSEKKKSSP

SEQ ID NO: 399 - protein, 350 aa, artificial sequence
  ZM6.22v2(I7)
MNTKYNKEFLLHLAGFVDGDGSIKAQIKPQQSCKFKHALRLTFQVTQKTRRRWFLDELVDEIGVGYVYDRGSVSDYILSEIKPLHNFLTQLQPFLKLKQKQANLVLKIIEQLPSAKESPDKFLRVCTWVDQIAALNDSKTRKTTSETVRAVLDSLPGSVGGLSPSQASSAASSASSSPGSGISEALRAGATKSKEFLLYLAGFVDGDGSIIASIKPNQCYKFKHQLSLTFTVTQKTQRRWFLDKLVDEIGVGYVYDQGSVSHYRLSQIKPLHNFLTQLQPFLKLKQKQANLVLKIIEQLPSAKESPDKFLEVCTWVDRIAALNDSKTRKTTSETVRAVLDSLSEKKKSSP

SEQ ID NO: 400 - protein, 350 aa, artificial sequence
  ZM6.22v2(I8)
MNTKYNKEFLLHLAGFVDGDGSIKAQIKPQQSCKFKHALRLTFQVTQKTQRRWFLDKLVDEIGVGYVYDRGSVSDYILSEIKPLHNFLTQLQPFLKLKQKQANLVLKIIEQLPSAKESPDKFLRVCTWADQIAALNDSKTRKTTSETVRAVLDSLPGSVGGLSPSQASSAASSASSSPGSGISEALRAGATKSKEFLLYLAGFVDGDGSIIASIKPNQCYKFKHQLSLTFTVTQKTQRRWFLDKLVDEIGVGYVYDQGSVSHYRLSQIKPLHNFLTQLQPFLKLKQKQANLVLKIIEQLPSAKESPDKFLRVCTWVDQIAALNDSKTRKTTSETVRAVLDSLSEKKKSSP

SEQ ID NO: 401 - protein, 350 aa, artificial sequence
  ZM6.22v2(I9)
MNTKYNKEFLLYLAGFVDGDGSIKAQIKPQQSCKFKHALRLTFQVTQKTQRRWFLDELVDEIGVGYVYDRGSVSDYILSEIKPLHNFLTQLQPFLKLKQKQANLVLKIIEQLPSAKESPDKFLEVCTWVDQIAALNDSKTRKTTSETVRAVLDSLPGSVGGLSPSQASSAASSASSSPGSGISEALRAGATKSKEFLLYLAGFVDGDGSIIASIKPNQCYKFKHQLSLTFTVTQKTQRRWFLDKLVDEIGVGYVYDQGSVSHYRLSQIKPLHNFLTQLQPFLKLKQKQANLVLKIIEQLPSAKESPDKFLEVCTWADRIAALNDSKTRKTTSETVRAVLDSLSEKKKSSP

SEQ ID NO: 402 - protein, 350 aa, artificial sequence
  ZM6.22v2(J7)
MNTKYNKEFLLHLAGFVDGDGSIKAQIKPQQSCKFKHALRLTFQVTQKTQRRWFLLKLVDEIGVGYVYDRGSVSDYILSEIKPLHNFLTQLQPFLKLKQKQANLALKIIEQLPSAKESPDKFLRVCTWADRIAALNDSKTRKTTSETVRAVLDSLPGSVGGLSPSQASSAASSASSSPGSGISEALRAGATKSKEFLLYLAGFVDGDGSIIASIKPNQCYKFKHQLSLTFTVTQKTQRRWFLDKLVDEIGVGYVYDQGSVSHYRLSQIKPLHNFLTQLQPFLKLKQKQANLVLKIIEQLPSAKESPDKFLEVCTWVDQIAALNDSKTRKTTSETVRAVLDSLSEKKKSSP

SEQ ID NO: 403 - protein, 350 aa, artificial sequence
  ZM6.22v2(J8)
MNTKYNKEFLLHLAGFVDGDGSIKAQIKPQQSCKFKHALRLTFQVTQKTQRRWILDELVDEIGVGYVYDRGSVSDYILSEIKPLHNFLTQLQPFLKLKQKQANLALKIIEQLPSAKESPDKFLRVCTWVDRIAALNDSKTRKTTSETVRAVLDSLPGSVGGLSPSQASSAASSASSSPGSGISEALRAGATKSKEFLLYLAGFVDGDGSIIASIKPNQCYKFKHQLSLTFTVTQKTQRRWFLDKLVDEIGVGYVYDQGSVSHYRLSQIKPLHNFLTQLQPFLKLKQKQANLVLKIIEQLPSAKESPDKFLRVCTWVDQIAALNDSKTRKTTSETVRAVLDSLSEKKKSSP

SEQ ID NO: 404 - DNA, 1050 bp, artificial sequence
  ZM6.22v2 yeast
atgaacaccaagtacaacaaggagttcctgctctacctggccggcttcgtggacggcgacggctccatcaaggcgcagatcaagccgcagcagtcctgcaagttcaagcacgcgctccgcctgaccttccaggtgacccagaagacgcagaggcgctggttcctcgacaagctggtcgacgagatcggggtgggctacgtctacgaccgcgggtcggtgtccgactacatcctctccgagatcaagcccctgcacaacttcctcacccagctccagccgttcctcaagctgaagcagaagcaggcgaacctcgtcctgaagatcatcgagcagctcccctcggccaaggagtccccggacaagttcctggaggtgtgcacgtgggtcgaccagatcgcggccctcaacgacagcaagacccgcaagacgacctcggagacggtgcgggcggtcctggactccctcccaggatccgtgggaggtctatcgccatctcaggcatccagcgccgcatcctcggcttcctcaagcccgggttcagggatctccgaagcactcagagctggagcaactaagtccaaagagtttttattatatttagcggggtttgtcgatggggatgggagtataatagccagtataaaacccaatcaatgttataaatttaaacatcaattaagtttaacatttacggtcacgcaaaaaacccaacgtaggtggtttttagataaattagtggatgaaataggcgtcgggtatgtgtatgatcagggcagcgtcagtcattataggttaagtcaaataaaaccgttacataattttttaacgcaattacaaccctttttaaaattaaaacaaaaacaagccaatttagtgttaaaaataatagaacaattaccgagcgcgaaagaaagtcccgataaatttttagaagtctgtacctgggtggatcaaatagccgcgttaaatgattcaaaaacgaggaaaaccacgagcgaaaccgtcagagccgtgttagatagtttatcagaaaagaagaaaagcagtccg

SEQ ID NO: 405 - DNA, 1050 bp, artificial sequence
  ZM6.22v2(J2)
atgaacaccaagtacaacaaggagttcctgctccatctggccggcttcgtggacggcgacggctccatcaaggcgcagatcaagccgcagcagtcctgcaagttcaagcacgcgctccgcctgaccttccaggtgacccagaagacgcagaggcgctggttcctcgacaagctggtcgacgagatcggggtgggctacgtctacgaccgcgggtcggtgtccgactacatcctctccgagatcaagcccctgcacaacttcctcacccagctccagccgttcctcaagctgaagcagaagcaggcgaacctcgtcctgaagatcatcgagcagctcccctcggccaaggagtccccggacaagttcctgagagtgtgcacgtgggtcgaccagatcgcggccctcaacgacagcaagacccgcaagacgacctcggagacggtgcgggcggtcctggactccctcccaggatccgtgggaggtctatcgccatctcaggcatccagcgccgcatcctcggcttcctcaagcccgggttcagggatctccgaagcactcagagctggagcaactaagtccaaagagtttttattatatttagcggggtttgtcgatggggatgggagtataatagccagtataaaacccaatcaatgttataaatttaaacatcaattaagtttaacatttacggtcacgcaaaaaacccaacgtaggtggtttttagataaattagtggatgaaataggcgtcgggtatgtgtatgatcagggcagcgtcagtcattataggttaagtcaaataaaaccgttacataattttttaacgcaattacaaccctttttaaaattaaaacaaaaacaagccaatttagtgttaaaaataatagaacaattaccgagcgcgaaagaaagtcccgataaatttttagaagtctgtacctgggtggatcaaatagccgcgttaaatgattcaaaaacgaggaaaaccacgagcgaaaccgtcagagccgtgttagatagtttatcagaaaagaagaaaagcagtccg

SEQ ID NO: 406 - DNA, 1050 bp, artificial sequence
  ZM6.22v2(J3
atgaacaccaagtacaacaaggagttcctgctctacctggccggcttcgtggacggcgacggctccatcaaggcgcagatcaagccgcagcagtcctgcaagttcaagcacgcgctccgcctgaccttccaggtgacccagaagacgagaaggcgctggtttctccttaagctggtcgacgagatcggggtgggctacgtctacgaccgcgggtcggtgtccgactacatcctctccgagatcaagcccctgcacaacttcctcacccagctccagccgttcctcaagctgaagcagaagcaggcgaacctcgtcctgaagatcatcgagcagctcccctcggccaaggagtccccggacaagttcctggaggtgtgcacgtgggtagacagaatcgcggccctcaacgacagcaagacccgcaagacgacctcggagacggtgcgggcggtcctggactccctcccaggatccgtgggaggtctatcgccatctcaggcatccagcgccgcatcctcggcttcctcaagcccgggttcagggatctccgaagcactcagagctggagcaactaagtccaaagagtttttattatatttagcggggtttgtcgatggggatgggagtataatagccagtataaaacccaatcaatgttataaatttaaacatcaattaagtttaacatttacggtcacgcaaaaaaccagacgtaggtggtttttagataaattagtggatgaaataggcgtcgggtatgtgtatgatcagggcagcgtcagtcattataggttaagtcaaataaaaccgttacataattttttaacgcaattacaaccctttttaaaattaaaacaaaaacaagccaatttagtgttaaaaataatagaacaattaccgagcgcgaaagaaagtcccgataaatttttaagggtctgtacctgggcagatagaatagccgcgttaaatgattcaaaaacgaggaaaaccacgagcgaaaccgtcagagccgtgttagatagtttatcagaaaagaagaaaagcagtccg

SEQ ID NO: 407 - DNA, 1050 bp, artificial sequence
  ZM6.22v2(J4)
atgaacaccaagtacaacaaggagttcctgctccatctggccggcttcgtggacggcgacggctccatcaaggcgcagatcaagccgcagcagtcctgcaagttcaagcacgcgctccgcctgaccttccaggtgacccagaagacgcagaggcgctggttcctcgacaagctggtcgacgagatcggggtgggctacgtctacgaccgcgggtcggtgtccgactacatcctctccgagatcaagcccctgcacaacttcctcacccagctccagccgttcctcaagctgaagcagaagcaggcgaacctcgtcctgaagatcatcgagcagctcccctcggccaaggagtccccggacaagttcctggaggtgtgcacgtgggtcgaccagatcgcggccctcaacgacagcaagacccgcaagacgacctcggagacggtgcgggcggtcctggactccctcccaggatccgtgggaggtctatcgccatctcaggcatccagcgccgcatcctcggcttcctcaagcccgggttcagggatctccgaagcactcagagctggagcaactaagtccaaagagtttttattatatttagcggggtttgtcgatggggatgggagtataatagccagtataaaacccaatcaatgttataaatttaaacatcaattaagtttaacatttacggtcacgcaaaaaaccagacgtaggtggtttttagataaattagtggatgaaataggcgtcgggtatgtgtatgatcagggcagcgtcagtcattataggttaagtcaaataaaaccgttacataattttttaacgcaattacaaccctttttaaaattaaaacaaaaacaagccaatttagtgttaaaaataatagaacaattaccgagcgcgaaagaaagtcccgataaatttttagaagtctgtacctgggtagatagaatagccgcgttaaatgattcaaaaacgaggaaaaccacgagcgaaaccgtcagagccgtgttagatagtttatcagaaaagaagaaaagcagtccg

SEQ ID NO: 408 - DNA, 1050 bp, artificial sequence
  ZM6.22v2(J5)
atgaacaccaagtacaacaaggagttcctgctccatctggccggcttcgtggacggcgacggctccatcaaggcgcagatcaagccgcagcagtcctgcaagttcaagcacgcgctccgcctgaccttccaggtgacccagaagacgcagaggcgctggtttctcgataagctggtcgacgagatcggggtgggctacgtctacgaccgcgggtcggtgtccgactacatcctctccgagatcaagcccctgcacaacttcctcacccagctccagccgttcctcaagctgaagcagaagcaggcgaacctcgcactgaagatcatcgagcagctcccctcggccaaggagtccccggacaagttcctgagagtgtgcacgtgggtcgaccagatcgcggccctcaacgacagcaagacccgcaagacgacctcggagacggtgcgggcggtcctgttatccctcccaggatccgtgggaggtctatcgccatctcaggcatccagcgccgcatcctcggcttcctcaagcccgggttcagggatctccgaagcactcagagctggagcaactaagtccaaagagtttttattatatttagcggggtttgtcgatggggatgggagtataatagccagtataaaacccaatcaatgttataaatttaaacatcaattaagtttaacatttacggtcacgcaaaaaacccaacgtaggtggtttttagataaattagtggatgaaataggcgtcgggtatgtgtatgatcagggcagcgtcagtcattataggttaagtcaaataaaaccgttacataattttttaacgcaattacaaccctttttaaaattaaaacaaaaacaagccaatttagtgttaaaaataatagaacaattaccgagcgcgaaagaaagtcccgataaatttttaagggtctgtacctgggtggatcaaatagccgcgttaaatgattcaaaaacgaggaaaaccacgagcgaaaccgtcagagccgtgttagatagtttatcagaaaagaagaaaagcagtccg

SEQ ID NO: 409 - DNA, 1050 bp, artificial sequence
  ZM6.22v2(I2)
atgaacaccaagtacaacaaggagttcctgctccatctggccggcttcgtggacggcgacggctccatcaaggcgcagatcaagccgcagcagtcctgcaagttcaagcacgcgctccgcctgaccttccaggtgacccagaagacgagaaggcgctggttcctcgataagctggtcgacgagatcggggtgggctacgtctacgaccgcgggtcggtgtccgactacatcctctccgagatcaagcccctgcacaacttcctcacccagctccagccgttcctcaagctgaagcagaagcaggcgaacctcgtcctgaagatcatcgagcagctcccctcggccaaggagtccccggacaagttcctgagagtgtgcacgtgggcagacagaatcgcggccctcaacgacagcaagacccgcaagacgacctcggagacggtgcgggcggtcctggactccctcccaggatccgtgggaggtctatcgccatctcaggcatccagcgccgcatcctcggcttcctcaagcccgggttcagggatctccgaagcactcagagctggagcaactaagtccaaagagtttttattatatttagcggggtttgtcgatggggatgggagtataatggccagtataaaacccaatcaatgttataaatttaaacatcaattaagtttaacatttacggtcacgcaaaaaacccaacgtaggtggtttttagataaattagtggatgaaataggcgtcgggtatgtgtatgatcagggcagcgtcagtcattataggttaagtcaaataaaaccgttacataattttttaacgcaattacaaccctttttaaaattaaaacaaaaacaagccaatttagtgttaaaaataatagaacaattaccgagcgcgaaagaaagtcccgataaatttttaagggtctgtacctgggcagatagaatagccgcgttaaatgattcaaaaacgaggaaaaccacgagcgaaaccgtcagagccgtgttagatagtttatcagaaaagaagaaaagcagtccg

SEQ ID NO: 410 - DNA, 1050 bp, artificial sequence
  ZM6.22v2(I3)
atgaacaccaagtacaacaaggagttcctgctccatctggccggcttcgtggacggcgacggctccatcaaggcgcagatcaagccgcagcagtcctgcaagttcaagcacgcgctccgcctgaccttccaggtgacccagaagacgcagaggcgctggttcctcgacaagctggtcgacgagatcggggtgggctacgtctacgaccgcgggtcggtgtccgactacatcctctccgagatcaagcccctgcacaacttcctcacccagctccagccgttcctcaagctgaagcagaagcaggcgaacctcgtcctgaagatcatcgagcagctcccctcggccaaggagtccccggacaagttcctggaggtgtgcacgtgggtcgaccagatcgcggccctcaacgacagcaagacccgcaagacgacctcggagacggtgcgggcggtcctggactccctcccaggatccgtgggaggtctatcgccatctcaggcatccagcgccgcatcctcggcttcctcaagcccgggttcagggatctccgaagcactcagagctggagcaactaagtccaaagagtttttattatatttagcggggtttgtcgatggggatgggagtataatagccagtataaaacccaatcaatgttataaatttaaacatcaattaagtttaacatttacggtcacgcaaaaaacccaacgtaggtggtttttagataaattagtggatgaaataggcgtcgggtatgtgtatgatcagggcagcgtcagtcattataggttaagtcaaataaaaccgttacataattttttaacgcaattacaaccctttttaaaattaaaacaaaaacaagccaatttagtgttaaaaataatagaacaattaccgagcgcgaaagaaagtcccgataaatttttaagggtctgtacctgggtggatcaaatagccgcgttaaatgattcaaaaacgaggaaaaccacgagcgaaaccgtcagagccgtgttagatagtttatcagaaaagaagaaaagcagtccg

SEQ ID NO: 411 - DNA, 1050 bp, artificial sequence
  ZM6.22v2(I4)
atgaacaccaagtacaacaaggagttcctgctctacctggccggcttcgtggacggcgacggctccatcaaggcgcagatcaagccgcagcagtcctgcaagttcaagcacgcgctccgcctgaccttccaggtgacccagaagacgcagaggcgctggttcctcgatgagctggtcgacgagatcggggtgggctacgtctacgaccgcgggtcggtgtccgactacatcctctccgagatcaagcccctgcacaacttcctcacccagctccagccgttcctcaagctgaagcagaagcaggcgaacctcgtcctgaagatcatcgagcagctcccctcggccaaggagtccccggacaagttcctgagagtgtgcacgtgggtcgaccagatcgcggccctcaacgacagcaagacccgcaagacgacctcggagacggtgcgggcggtcctggactccctcccaggatccgtgggaggtctatcgccatctcaggcatccagcgccgcatcctcggcttcctcaagcccgggttcagggatctccgaagcactcagagctggagcaactaagtccaaagagtttttattatatttagcggggtttgtcgatggggatgggagtataatagccagtataaaacccaatcaatgttataaatttaaacatcaattaagtttaacatttacggtcacgcaaaaaacccaacgtaggtggtttttagataaattagtggatgaaataggcgtcgggtatgtgtatgatcagggcagcgtcagtcattataggttaagtcaaataaaaccgttacataattttttaacgcaattacaaccctttttaaaattaaaacaaaaacaagccaatttagctttaaaaataatagaacaattaccgagcgcgaaagaaagtcccgataaatttttagaagtctgtacctgggcagatagaatagccgcgttaaatgattcaaaaacgaggaaaaccacgagcgaaaccgtcagagccgtgttagatagtttatcagaaaagaagaaaagcagtccg

SEQ ID NO: 412 - DNA, 1050 bp, artificial sequence
  ZM6.22v2(I5)
atgaacaccaagtacaacaaggagttcctgctctacctggccggcttcgtggacggcgacggctccatcaaggcgcagatcaagccgcagcagtcctgcaagttcaagcacgcgctccgcctgaccttccaggtgacccagaagacgcagaggcgctggttcctcgataagctggtcgacgagatcggggtgggctacgtctacgaccgcgggtcggtgtccgactacatcctctccgagatcaagcccctgcacaacttcctcacccagctccagccgttcctcaagctgaagcagaagcaggcgaacctcgtcctgaagatcatcgagcagctcccctcggccaaggagtccccggacaagttcctggaggtgtgcacgtgggtcgaccagatcgcggccctcaacgacagcaagacccgcaagacgacctcggagacggtgcgggcggtcctggactccctcccaggatccgtgggaggtctatcgccatctcaggcatccagcgccgcatcctcggcttcctcaagcccgggttcagggatctccgaagcactcagagctggagcaactaagtccaaagagtttttattatatttagcggggtttgtcgatggggatgggagtataatagccagtataaaacccaatcaatgttataaatttaaacatcaattaagtttaacatttacggtcacgcaaaaaaccagacgtaggtggtttttagataaattagtggatgaaataggcgtcgggtatgtgtatgatcagggcagcgtcagtcattataggttaagtcaaataaaaccgttacataattttttaacgcaattacaaccctttttaaaattaaaacaaaaacaagccaatttagtgttaaaaataatagaacaattaccgagcgcgaaagaaagtcccgataaatttttagaagtctgtacctgggtggatcaaatagccgcgttaaatgattcaaaaacgaggaaaaccacgagcgaaaccgtcagagccgtgttagatagtttatcagaaaagaagaaaagcagtccg

SEQ ID NO: 413 - DNA, 1050 bp, artificial sequence
  ZM6.22v2(I6)
atgaacaccaagtacaacaaggagttcctgctccatctggccggcttcgtggacggcgacggctccatcaaggcgcagatcaagccgcagcagtcctgcaagttcaagcacgcgctccgcctgaccttccaggtgacccagaagacgcaaaggcgctggtttctccttgagctggtcgacgagatcggggtgggctacgtctacgaccgcgggtcggtgtccgactacatcctctccgagatcaagcccctgcacaacttcctcacccagctccagccgttcctcaagctgaagcagaagcaggcgaacctcgcactgaagatcatcgagcagctcccctcggccaaggagtccccggacaagttcctggaggtgtgcacgtgggtcgaccagatcgcggccctcaacgacagcaagacccgcaagacgacctcggagacggtgcgggcggtcctggactccctcccaggatccgtgggaggtctatcgccatctcaggcatccagcgccgcatcctcggcttcctcaagcccgggttcagggatctccgaagcactcagagctggagcaactaagtccaaagagtttttattatatttagcggggtttgtcgatggggatgggagtataatagccagtataaaacccaatcaatgttataaatttaaacatcaattaagtttaacatttacggtcacgcaaaaaacccaacgtaggtggtttttagataaattagtggatgaaataggcgtcgggtatgtgtatgatcagggcagcgtcagtcattataggttaagtcaaataaaaccgttacataattttttaacgcaattacaaccctttttaaaattaaaacaaaaacaagccaatttagtgttaaaaataatagaacaattaccgagcgcgaaagaaagtcccgataaatttttagaagtctgtacctgggcagatagaatagccgcgttaaatgattcaaaaacgaggaaaaccacgagcgaaaccgtcagagccgtgttagatagtttatcagaaaagaagaaaagcagtccg

SEQ ID NO: 414 - DNA, 1050 bp, artificial sequence
  ZM6.22v2(I7)
atgaacaccaagtacaacaaggagttcctgctccatctggccggcttcgtggacggcgacggctccatcaaggcgcagatcaagccgcagcagtcctgcaagttcaagcacgcgctccgcctgaccttccaggtgacccagaagacgagaaggcgctggtttctcgatgagctggtcgacgagatcggggtgggctacgtctacgaccgcgggtcggtgtccgactacatcctctccgagatcaagcccctgcacaacttcctcacccagctccagccgttcctcaagctgaagcagaagcaggcgaacctcgtcctgaagatcatcgagcagctcccctcggccaaggagtccccggacaagttcctgagagtgtgcacgtgggtcgaccagatcgcggccctcaacgacagcaagacccgcaagacgacctcggagacggtgcgggcggtcctggactccctcccaggatccgtgggaggtctatcgccatctcaggcatccagcgccgcatcctcggcttcctcaagcccgggttcagggatctccgaagcactcagagctggagcaactaagtccaaagagtttttattatatttagcggggtttgtcgatggggatgggagtataatagccagtataaaacccaatcaatgttataaatttaaacatcaattaagtttaacatttacggtcacgcaaaaaacccaacgtaggtggtttttagataaattagtggatgaaataggcgtcgggtatgtgtatgatcagggcagcgtcagtcattataggttaagtcaaataaaaccgttacataattttttaacgcaattacaaccctttttaaaattaaaacaaaaacaagccaatttagtgttaaaaataatagaacaattaccgagcgcgaaagaaagtcccgataaatttttagaagtctgtacctgggtagatagaatagccgcgttaaatgattcaaaaacgaggaaaaccacgagcgaaaccgtcagagccgtgttagatagtttatcagaaaagaagaaaagcagtccg

SEQ ID NO: 415 - DNA, 1050 bp, artificial sequence
  ZM6.22v2(I8)
atgaacaccaagtacaacaaggagttcctgctccatctggccggcttcgtggacggcgacggctccatcaaggcgcagatcaagccgcagcagtcctgcaagttcaagcacgcgctccgcctgaccttccaggtgacccagaagacgcagaggcgctggttcctcgacaagctggtcgacgagatcggggtgggctacgtctacgaccgcgggtcggtgtccgactacatcctctccgagatcaagcccctgcacaacttcctcacccagctccagccgttcctcaagctgaagcagaagcaggcgaacctcgtcctgaagatcatcgagcagctcccctcggccaaggagtccccggacaagttcctgagagtgtgcacgtgggcagaccaaatcgcggccctcaacgacagcaagacccgcaagacgacctcggagacggtgcgggcggtcctggactccctcccaggatccgtgggaggtctatcgccatctcaggcatccagcgccgcatcctcggcttcctcaagcccgggttcagggatctccgaagcactcagagctggagcaactaagtccaaagagtttttattatatttagcggggtttgtcgatggggatgggagtataatagccagtataaaacccaatcaatgttataaatttaaacatcaattaagtttaacatttacggtcacgcaaaaaacccaacgtaggtggtttttagataaattagtggatgaaataggcgtcgggtatgtgtatgatcagggcagcgtcagtcattataggttaagtcaaataaaaccgttacataattttttaacgcaattacaaccctttttaaaattaaaacaaaaacaagccaatttagtgttaaaaataatagaacaattaccgagcgcgaaagaaagtcccgataaatttttaagggtctgtacctgggtggatcaaatagccgcgttaaatgattcaaaaacgaggaaaaccacgagcgaaaccgtcagagccgtgttagatagtttatcagaaaagaagaaaagcagtccg

SEQ ID NO: 416 - DNA, 1050 bp, artificial sequence
  ZM6.22v2(I9)
atgaacaccaagtacaacaaggagttcctgctctacctggccggcttcgtggacggcgacggctccatcaaggcgcagatcaagccgcagcagtcctgcaagttcaagcacgcgctccgcctgaccttccaggtgacccagaagacgcaaaggcgctggtttctcgatgagctggtcgacgagatcggggtgggctacgtctacgaccgcgggtcggtgtccgactacatcctctccgagatcaagcccctgcacaacttcctcacccagctccagccgttcctcaagctgaagcagaagcaggcgaacctcgtcctgaagatcatcgagcagctcccctcggccaaggagtccccggacaagttcctggaggtgtgcacgtgggtcgaccagatcgcggccctcaacgacagcaagacccgcaagacgacctcggagacggtgcgggcggtcctggactccctcccaggatccgtgggaggtctatcgccatctcaggcatccagcgccgcatcctcggcttcctcaagcccgggttcagggatctccgaagcactcagagctggagcaactaagtccaaagagtttttattatatttagcggggtttgtcgatggggatgggagtataatagccagtataaaacccaatcaatgttataaatttaaacatcaattaagtttaacatttacggtcacgcaaaaaacccaacgtaggtggtttttagataaattagtggatgaaataggcgtcgggtatgtgtatgatcagggcagcgtcagtcattataggttaagtcaaataaaaccgttacataattttttaacgcaattacaaccctttttaaaattaaaacaaaaacaagccaatttagtgttaaaaataatagaacaattaccgagcgcgaaagaaagtcccgataaatttttagaagtctgtacctgggcagatagaatagccgcgttaaatgattcaaaaacgaggaaaaccacgagcgaaaccgtcagagccgtgttagatagtttatcagaaaagaagaaaagcagtccg

SEQ ID NO: 417 - DNA, 1050 bp, artificial sequence
  ZM6.22v2(J7)
atgaacaccaagtacaacaaggagttcctgctccatctggccggcttcgtggacggcgacggctccatcaaggcgcagatcaagccgcagcagtcctgcaagttcaagcacgcgctccgcctgaccttccaggtgacccagaagacgcagaggcgctggtttctccttaagctggtcgacgagatcggggtgggctacgtctacgaccgcgggtcggtgtccgactacatcctctccgagatcaagcccctgcacaacttcctcacccagctccagccgttcctcaagctgaagcagaagcaggcgaacctcgcactgaagatcatcgagcagctcccctcggccaaggagtccccggacaagttcctgagagtgtgcacgtgggcagacagaatcgcggccctcaacgacagcaagacccgcaagacgacctcggagacggtgcgggcggtcctggactccctcccaggatccgtgggaggtctatcgccatctcaggcatccagcgccgcatcctcggcttcctcaagcccgggttcagggatctccgaagcactcagagctggagcaactaagtccaaagagtttttattatatttagcggggtttgtcgatggggatgggagtataatagccagtataaaacccaatcaatgttataaatttaaacatcaattaagtttaacatttacggtcacgcaaaaaacccaacgtaggtggtttttagataaattagtggatgaaataggcgtcgggtatgtgtatgatcagggcagcgtcagtcattataggttaagtcaaataaaaccgttacataattttttaacgcaattacaaccctttttaaaattaaaacaaaaacaagccaatttagtgttaaaaataatagaacaattaccgagcgcgaaagaaagtcccgataaatttttagaagtctgtacctgggtagatcaaatagccgcgttaaatgattcaaaaacgaggaaaaccacgagcgaaaccgtcagagccgtgttagatagtttatcagaaaagaagaaaagcagtccg

SEQ ID NO: 418 - DNA, 1050 bp, artificial sequence
  ZM6.22v2(J8)
atgaacaccaagtacaacaaggagttcctgctccatctggccggcttcgtggacggcgacggctccatcaaggcgcagatcaagccgcagcagtcctgcaagttcaagcacgcgctccgcctgaccttccaggtgacccagaagacgcaaaggcgctggattctcgatgagctggtcgacgagatcggggtgggctacgtctacgaccgcgggtcggtgtccgactacatcctctccgagatcaagcccctgcacaacttcctcacccagctccagccgttcctcaagctgaagcagaagcaggcgaacctcgcactgaagatcatcgagcagctcccctcggccaaggagtccccggacaagttcctgagagtgtgcacgtgggtagacagaatcgcggccctcaacgacagcaagacccgcaagacgacctcggagacggtgcgggcggtcctggactccctcccaggatccgtgggaggtctatcgccatctcaggcatccagcgccgcatcctcggcttcctcaagcccgggttcagggatctccgaagcactcagagctggagcaactaagtccaaagagtttttattatatttagcggggtttgtcgatggggatgggagtataatagccagtataaaacccaatcaatgttataaatttaaacatcaattaagtttaacatttacggtcacgcaaaaaacccaacgtaggtggtttttagataaattagtggatgaaataggcgtcgggtatgtgtatgatcagggcagcgtcagtcattataggttaagtcaaataaaaccgttacataattttttaacgcaattacaaccctttttaaaattaaaacaaaaacaagccaatttagtgttaaaaataatagaacaattaccgagcgcgaaagaaagtcccgataaatttttaagggtctgtacctgggtggatcaaatagccgcgttaaatgattcaaaaacgaggaaaaccacgagcgaaaccgtcagagccgtgttagatagtttatcagaaaagaagaaaagcagtccg

SEQ ID NO: 419 - DNA, 1050 bp, artificial sequence
  MS26+(7) no intron
atgaacaccaagtacaacaaggagttcctgctctacctggccggcatcgtggacggcgacggctccatcatcgcgcagatcgacccgcagcagtcctacaagttcaagcactccctccgcctgcgcttcaccgtgacccagaagacgcagaggcgctggttcctcgacaagctggtcgacgagatcggggtgggcaaggtccgcgaccgcgggtcggtgtccgactacatcctctgccagatcaagcccctgcacaacttcctcacccagctgcagccgttcctcaagctgaagcagaagcaggcgaacctcgtcctgaagatcatcgagcagctcccctcggccaaggagtccccggacaagttcctggaggtgtgcacgtgggtcgaccagatcgcggccctcaacgacagcaagacccgcaagacgacctcggagacggtgcgggcggtcctggactccctcccaggatccgtgggaggtctatcgccatctcaggcatccagcgccgcatcctcggcttcctcaagcccgggttcagggatctccgaaggactcagagctggagcaactaagtccaaggaattcctgctctacctggcgggcttcgtggacggcgacggctccatctgcgcgtccatcgacccgaaccagtcctgcaagttcaagcaccagctccgcctgcgcttcaccgtgacccagaagacgcagaggcgctggttcctcgacgagctggtcgacgagatcggggtgggcaaggtctacgaccgcgggtcggtgtccgactaccgcctctgccagatcaagcccctgcacaacttcctcacccagctccagccgttcctcaagcttaagcagaagcaggcgaacctcgtcctgaagatcatcgagcagctcccctcggccaaggagtccccggacaagttcctggaggtgtgcacgtgggcggaccagatcgcggccctcaacgacagcaagacccgcaagacgacctcggagacggtgcgggcggttctagactccctcagcgagaagaagaagtcgtccccc

SEQ ID NO: 420 - protein, 38 aa, artificial sequence
  linker polypeptide of LIG3-4, MHP14, MHP77
PGSVGGLSPSQASSAASSASSSPGSGISEALRAGATKS

SEQ ID NO: 421 - protein, 38 aa, artificial sequence
  linker polypeptide of MHP14(10)
PGSVEVYRHLRHPAPHPRLPQARVQGSPKHSELEPKSK

SEQ ID NO: 422 - protein, 37 aa, artificial sequence
  linker polypeptide of MHP77(L9-01
PGSWEVYRHLRHPAPHPRLPQARVQGSPKHSELEQLS

SEQ ID NO: 423 - DNA, 22 bp, artificial sequence
  TS21 recognition sequence
ggcactctcgtgtgtgattaaa

SEQ ID NO: 424 - DNA, 22 bp, artificial sequence
  TS14 recognition sequence
cagacgtacgcaagtagctttg

SEQ ID NO: 425 - DNA, 1272 bp, artificial sequence
  plant-optimized TS21 meganuclease with a nuclear localization signal and an intron
atggcaccgaagaagaagcgcaaggtgcatatgaacaccaagtacaacaaggagttcctgctctacctggccggcttcgtggacggcgacggctccatcatggcgcagatcaagccgcagcagtcctgcaagttcaagcacgcgctccagctgaccttcaccgtgacccagaagacgcagaggcgctggttcctcgacaagctggtcgacgagatcggggtgggcaaggtctacgaccgcgggtcggtgtccgactacatcctctcccagatcaagcccctgcacaacttcctcacccagctccagccgttcctcaagctgaagcagaagcaggcgaacctcgtcctgaagatcatcgagcagctcccctcggccaaggagtccccggacaagttcctggaggtaagtttctgcttctacctttgatatatatataataattatcattaattagtagtaatataatatttcaaatatttttttcaaaataaaagaatgtagtatatagcaattgcttttctgtagtttataagtgtgtatattttaatttataacttttctaatatatgaccaaaacatggtgatgtgcaggtgtgcacgtgggtcgaccagatcgcggccctcaacgacagcaagacccgcaagacgacctcggagacggtgcgggcggtcctggactccctcccaggatccgtgggaggtctatcgccatctcaggcatccagcgccgcatcctcggcttcctcaagcccgggttcagggatctccgaagcactcagagctggagcaactaagtccaaggaattcctgctctacctggccggcttcgtggacggcgacggctccatcaaggcgcagatcaagccgcgccagtcccgcaagttcaagcacgagctctccctgaccttccaggtgacccagaagacgcagaggcgctggttcctcgacaagctggtcgacgagatcggggtgggctacgtctacgaccgcgggtcggtgtccgactacatcctctcccagatcaagcccctgcacaacttcctcacccagctccagccgttcctcaagctgaagcagaagcaggcgaacctcgtcctgaagatcatcgagcagctcccctcggccaaggagtccccggacaagttcctggaggtgtgcacgtgggtcgaccagatcgcggccctcaacgacagcaagacccgcaagacgacctcggagacggtgcgggcggttctagactccctcagcgagaagaagaagtcgtccccctga

SEQ ID NO: 426 - DNA, 1272 bp, artificial sequence
  plant-optimized nucleotide sequence of the TS21(7) meganuclease with a nuclear localization signal and an intron
atggcaccgaagaagaagcgcaaggtgcatatgaacaccaagtacaacaaggagttcctgctctacctggccggcatcgtggacggcgacggctccatcatggcgcagatcaagccgcagcagtcctgcaagttcaagcacgcgctccagctgaccttcaccgtgacccagaagacgcagaggcgctggttcctcgacaagctggtcgacgagatcggggtgggcaaggtctacgaccgcgggtcggtgtccgactacatcctctcccagatcaagcccctgcacaacttcctcacccagctccagccgttcctcaagctgaagcagaagcaggcgaacctcgtcctgaagatcatcgagcagctcccctcggccaaggagtccccggacaagttcctggaggtaagtttctgcttctacctttgatatatatataataattatcattaattagtagtaatataatatttcaaatatttttttcaaaataaaagaatgtagtatatagcaattgcttttctgtagtttataagtgtgtatattttaatttataacttttctaatatatgaccaaaacatggtgatgtgcaggtgtgcacgtgggtcgaccagatcgcggccctcaacgacagcaagacccgcaagacgacctcggagacggtgcgggcggtcctggactccctcccaggatccgtgggaggtctatcgccatctcaggcatccagcgccgcatcctcggcttcctcaagcccgggttcagggatctccgaaggactcagagctggagcaactaagtccaaggaattcctgctctacctggccggcttcgtggacggcgacggctccatcaaggcgcagatcaagccgcgccagtcccgcaagttcaagcacgagctctccctgaccttccaggtgacccagaagacgcagaggcgctggttcctcgacgagctggtcgacgagatcggggtgggctacgtctacgaccgcgggtcggtgtccgactacatcctctcccagatcaagcccctgcacaacttcctcacccagctccagccgttcctcaagctgaagcagaagcaggcgaacctcgtcctgaagatcatcgagcagctcccctcggccaaggagtccccggacaagttcctggaggtgtgcacgtgggcggaccagatcgcggccctcaacgacagcaagacccgcaagacgacctcggagacggtgcgggcggttctagactccctcagcgagaagaagaagtcgtccccctga

SEQ ID NO: 427 - DNA, 1272 bp, artificial sequence
  plant-optimized nucleotide sequence of the TS21(15) meganuclease with a nuclear localization signal and an intron
atggcaccgaagaagaagcgcaaggtgcatatgaacaccaagtacaacaaggagttcctgctctacctggccggcttcgtggactccgacggctccatcatggcgcagatcaagccgcagcagtcctgcaagttcaagcacgcgctccagctgaccttcaccgtgacccagaagacgcagaggcgctggttcctcgacaagctggtcgacgagatcggggtgggcaaggtctacgaccgcgggtcggtgtccgactacatcctctcccagatcaagcccctgcacaacttcctcacccagctccagccgttcctcaagctgaagcagaagcaggcgaacctcgtcctgaagatcatcgagcagctcccctcggccaaggagtccccggacaagttcctggaggtaagtttctgcttctacctttgatatatatataataattatcattaattagtagtaatataatatttcaaatatttttttcaaaataaaagaatgtagtatatagcaattgcttttctgtagtttataagtgtgtatattttaatttataacttttctaatatatgaccaaaacatggtgatgtgcaggtgtgcacgtgggtcgaccagatcgcggccctcaacgacagcaagacccgcaagacgacctcggagacggtgcgggcggtcctggactccctcccaggatccgtgggaggtctatcgccatctcaggcatccagcgccgcatcctcggcttcctcaagcccgggttcagggatctccgaagcactcagagctggagcaactaagtccaaggaattcctgctctacctggccggcttcgtggacggcgacggctccatcaaggcgcagatcaagccgcgccagtcccgcaagttcaagcacgagctctccctgaccttccaggtgacccagaagacgcagaggcgctggttcctcgacaagctggtcgacgagatcggggtgggctacgtctacgaccgcgggtcggtgtccgactacatcctctcccagatcaagcccctgcacaacttcctcacccagctccagccgttcctcaagctgaagcagaagcaggcgaacctcgtcctgaagatcatcgagcagctcccctcggccaaggagtccccggacaagttcctggaggtgtgcacgtgggtcgaccagatcgcggccctcaacgacagcaagacccgcaagacgacctcggagacggtgcgggcggttctagactccctcagcgagaagaagaagtcgtccccctga

SEQ ID NO: 428 - DNA, 1272 bp, artificial sequence
  plant-optimized nucleotide sequence of the TS21(B65) meganuclease with a nuclear localization signal and an intron
atggcaccgaagaagaagcgcaaggtgcatatgaacaccaagtacaacaaggagttcctgctctacctggccggcttcgtggacggcgacggctgcatcatggcgcagatcaagccgcagcagtcctgcaagttcaagcacgcgctccagctgaccttcaccgtgacccagaagacgaagaggcgctggttcctcgacaagctggtcgacgagatcggggtgggcaaggtctacgaccgcaagtcggtgtccgactacatcctctcccagatcaagcccctgcacaacttcctcacccagctccagccgttcctcaagctgaagcagaagcaggcgaacctcgtcctgaagatcatcgagcagctcccctcggccaaggagtccccggacaagttcctggaggtaagtttctgcttctacctttgatatatatataataattatcattaattagtagtaatataatatttcaaatatttttttcaaaataaaagaatgtagtatatagcaattgcttttctgtagtttataagtgtgtatattttaatttataacttttctaatatatgaccaaaacatggtgatgtgcaggtgtgcacgtgggtcgaccagatcgcggccctcaacgacagcaagacccgcaagacgacctcggagacggtgcgggcggtcctggactccctcccaggatccgtgggaggtctatcgccatctcaggcatccagcgccgcatcctcggcttcctcaagcccgggttcagggatctccgaagcactcagagctggagcaactaagtccaaggaattcctgctctacctggccggcttcgtggacggcgacggctccatcaaggcgcagatcaagccgcgccagtcccgcaagttcaagcacgagctctccctgaccttccaggtgacccagaagacgcagaggcgctggttcctcgacaagctggtcgacgagatcggggtgggctacgtctacgaccgcaagtcggtgtccgactacatcctctcccagatcaagcccctgcacaacttcctcacccagctccagccgttcctcaagctgaagcagaagcaggcgaacctcgtcctgaagatcatcgagcagctcccctcggccaaggagtccccggacaagttcctggaggtgtgcacgtgggtcgaccagatcgcggccctcaacgacagcaagacccgcaagacgacctcggagacggtgcgggcggttctagactccctcagcgagaagaagaagtcgtccccctga

SEQ ID NO: 429 - protein, 360 aa, artificial sequence
  TS21 meganuclease
MAPKKKRKVHMNTKYNKEFLLYLAGFVDGDGSIMAQIKPQQSCKFKHALQLTFTVTQKTQRRWFLDKLVDEIGVGKVYDRGSVSDYILSQIKPLHNFLTQLQPFLKLKQKQANLVLKIIEQLPSAKESPDKFLEVCTWVDQIAALNDSKTRKTTSETVRAVLDSLPGSVGGLSPSQASSAASSASSSPGSGISEALRAGATKSKEFLLYLAGFVDGDGSIKAQIKPRQSRKFKHELSLTFQVTQKTQRRWFLDKLVDEIGVGYVYDRGSVSDYILSQIKPLHNFLTQLQPFLKLKQKQANLVLKIIEQLPSAKESPDKFLEVCTWVDQIAALNDSKTRKTTSETVRAVLDSLSEKKKSSP

SEQ ID NO: 430 - protein, 360 aa, artificial sequence
  TS21(7) meganuclease
MAPKKKRKVHMNTKYNKEFLLYLAGIVDGDGSIMAQIKPQQSCKFKHALQLTFTVTQKTQRRWFLDKLVDEIGVGKVYDRGSVSDYILSQIKPLHNFLTQLQPFLKLKQKQANLVLKIIEQLPSAKESPDKFLEVCTWVDQIAALNDSKTRKTTSETVRAVLDSLPGSVGGLSPSQASSAASSASSSPGSGISEGLRAGATKSKEFLLYLAGFVDGDGSIKAQIKPRQSRKFKHELSLTFQVTQKTQRRWFLDELVDEIGVGYVYDRGSVSDYILSQIKPLHNFLTQLQPFLKLKQKQANLVLKIIEQLPSAKESPDKFLEVCTWADQIAALNDSKTRKTTSETVRAVLDSLSEKKKSSP

SEQ ID NO: 431 - protein, 360 aa, artificial sequence
  TS21(15) meganuclease
MAPKKKRKVHMNTKYNKEFLLYLAGFVDSDGSIMAQIKPQQSCKFKHALQLTFTVTQKTQRRWFLDKLVDEIGVGKVYDRGSVSDYILSQIKPLHNFLTQLQPFLKLKQKQANLVLKIIEQLPSAKESPDKFLEVCTWVDQIAALNDSKTRKTTSETVRAVLDSLPGSVGGLSPSQASSAASSASSSPGSGISEALRAGATKSKEFLLYLAGFVDGDGSIKAQIKPRQSRKFKHELSLTFQVTQKTQRRWFLDKLVDEIGVGYVYDRGSVSDYILSQIKPLHNFLTQLQPFLKLKQKQANLVLKIIEQLPSAKESPDKFLEVCTWVDQIAALNDSKTRKTTSETVRAVLDSLSEKKKSSP

SEQ ID NO: 432 - protein, 360 aa, artificial sequence
  TS21(B65) meganuclease
MAPKKKRKVHMNTKYNKEFLLYLAGFVDGDGCIMAQIKPQQSCKFKHALQLTFTVTQKTKRRWFLDKLVDEIGVGKVYDRKSVSDYILSQIKPLHNFLTQLQPFLKLKQKQANLVLKIIEQLPSAKESPDKFLEVCTWVDQIAALNDSKTRKTTSETVRAVLDSLPGSVGGLSPSQASSAASSASSSPGSGISEALRAGATKSKEFLLYLAGFVDGDGSIKAQIKPRQSRKFKHELSLTFQVTQKTQRRWFLDKLVDEIGVGYVYDRKSVSDYILSQIKPLHNFLTQLQPFLKLKQKQANLVLKIIEQLPSAKESPDKFLEVCTWVDQIAALNDSKTRKTTSETVRAVLDSLSEKKKSSP

SEQ ID NO: 433 - DNA, 1272 bp, artificial sequence
  plant-optimized nucleotide sequence of TS14 meganuclease with a nuclear localization signal and an intron; DNA
atggcaccgaagaagaagcgcaaggtgcatatgaacaccaagtacaacaaggagttcctgctctacctggccggcttcgtggacggcgacggctccatcatcgcgtccatcaagccggagcagtcctacaagttcaagcaccgcctctccctgaccttcaccgtgacccagaagacgcagaggcgctggttcctcgacaagctggtcgacgagatcggggtgggcaaggtctacgaccgcgggtcggtgtccgactaccgcctctcccagatcaagcccctgcacaacttcctcacccagctccagccgttcctgaagctcaagcagaagcaggccaacctcgtgctgaagatcatcgagcagctgccctccgccaaggaatccccggacaagttcctggaggtaagtttctgcttctacctttgatatatatataataattatcattaattagtagtaatataatatttcaaatatttttttcaaaataaaagaatgtagtatatagcaattgcttttctgtagtttataagtgtgtatattttaatttataacttttctaatatatgaccaaaacatggtgatgtgcaggtgtgcacgtgggtggaccagatcgcggccctcaacgacagcaagacccgcaagacgacctcggagacggtgcgggcggtcctggactccctcccaggatccgtgggaggtctatcgccatctcaggcatccagcgccgcatcctcggcttcctcaagcccgggttcagggatctccgaagcactcagagctggagcaactaagtccaaggaattcctgctctacctggccggcttcgtggacggcgacggctccatcatcgcgaagatcaccccgaaccagtcctacaagttcaagcaccagctccagctgcgcttcaccgtgacccagaagacgcagaggcgctggttcctcgacaagctggtcgacgagatcggggtgggcaaggtctacgaccgcgggtcggtgtccgactacatcctctcccagatcaagcccctgcacaacttcctcacccagctccagccgttcctcaagctgaagcagaagcaggcgaacctcgtcctgaagatcatcgagcagctcccctcggccaaggagtccccggacaagttcctggaggtgtgcacgtgggtcgaccagatcgcggccctcaacgacagcaagacccgcaagacgacctcggagacggtgcgggcggttctagactccctcagcgagaagaagaagtcgtccccctga

SEQ ID NO: 434 - DNA, 1272 bp, artificial sequence
  plant-optimized nucleotide sequence of TS14(15)meganuclease with a nuclear localization signal and an intron
atggcaccgaagaagaagcgcaaggtgcatatgaacaccaagtacaacaaggagttcctgctctacctggccggcttcgtggactccgacggctccatcatcgcgtccatcaagccggagcagtcctacaagttcaagcaccgcctctccctgaccttcaccgtgacccagaagacgcagaggcgctggttcctcgacaagctggtcgacgagatcggggtgggcaaggtctacgaccgcgggtcggtgtccgactaccgcctctcccagatcaagcccctgcacaacttcctcacccagctccagccgttcctgaagctcaagcagaagcaggccaacctcgtgctgaagatcatcgagcagctgccctccgccaaggaatccccggacaagttcctggaggtaagtttctgcttctacctttgatatatatataataattatcattaattagtagtaatataatatttcaaatatttttttcaaaataaaagaatgtagtatatagcaattgcttttctgtagtttataagtgtgtatattttaatttataacttttctaatatatgaccaaaacatggtgatgtgcaggtgtgcacgtgggtggaccagatcgcggccctcaacgacagcaagacccgcaagacgacctcggagacggtgcgggcggtcctggactccctcccaggatccgtgggaggtctatcgccatctcaggcatccagcgccgcatcctcggcttcctcaagcccgggttcagggatctccgaagcactcagagctggagcaactaagtccaaggaattcctgctctacctggccggcttcgtggacggcgacggctccatcatcgcgaagatcaccccgaaccagtcctacaagttcaagcaccagctccagctgcgcttcaccgtgacccagaagacgcagaggcgctggttcctcgacaagctggtcgacgagatcggggtgggcaaggtctacgaccgcgggtcggtgtccgactacatcctctcccagatcaagcccctgcacaacttcctcacccagctccagccgttcctcaagctgaagcagaagcaggcgaacctcgtcctgaagatcatcgagcagctcccctcggccaaggagtccccggacaagttcctggaggtgtgcacgtgggtcgaccagatcgcggccctcaacgacagcaagacccgcaagacgacctcggagacggtgcgggcggttctagactccctcagcgagaagaagaagtcgtccccctga

SEQ ID NO: 435 - protein, 360 aa, artificial sequence
  TS14 meganuclease
MAPKKKRKVHMNTKYNKEFLLYLAGFVDGDGSIIASIKPEQSYKFKHRLSLTFTVTQKTQRRWFLDKLVDEIGVGKVYDRGSVSDYRLSQIKPLHNFLTQLQPFLKLKQKQANLVLKIIEQLPSAKESPDKFLEVCTWVDQIAALNDSKTRKTTSETVRAVLDSLPGSVGGLSPSQASSAASSASSSPGSGISEALRAGATKSKEFLLYLAGFVDGDGSIIAKITPNQSYKFKHQLQLRFTVTQKTQRRWFLDKLVDEIGVGKVYDRGSVSDYILSQIKPLHNFLTQLQPFLKLKQKQANLVLKIIEQLPSAKESPDKFLEVCTWVDQIAALNDSKTRKTTSETVRAVLDSLSEKKKSSP

SEQ ID NO: 436 - protein, 360 aa, artificial sequence
  TS14(15) meganuclease
MAPKKKRKVHMNTKYNKEFLLYLAGFVDSDGSIIASIKPEQSYKFKHRLSLTFTVTQKTQRRWFLDKLVDEIGVGKVYDRGSVSDYRLSQIKPLHNFLTQLQPFLKLKQKQANLVLKIIEQLPSAKESPDKFLEVCTWVDQIAALNDSKTRKTTSETVRAVLDSLPGSVGGLSPSQASSAASSASSSPGSGISEALRAGATKSKEFLLYLAGFVDGDGSIIAKITPNQSYKFKHQLQLRFTVTQKTQRRWFLDKLVDEIGVGKVYDRGSVSDYILSQIKPLHNFLTQLQPFLKLKQKQANLVLKIIEQLPSAKESPDKFLEVCTWVDQIAALNDSKTRKTTSETVRAVLDSLSEKKKSSP

What is claimed:

1. An isolated or recombinant polynucleotide comprising a nucleotide sequence encoding a meganuclease polypeptide, said polypeptide comprising:
a) an amino acid sequence having at least one amino acid modification at an amino acid position corresponding to a position of SEQ ID NO:1 selected from the group consisting of positions 2, 12, 16, 22, 23, 31, 36, 43, 50, 56, 58, 59, 62, 71, 72, 73, 80, 81, 82, 86, 91, 95, 98, 103, 113, 114, 116, 117, 118, 121, 124, 128, 129, 131, 147, 151, 153, 159, 160, 161, 162, 163, 164, 165, 166, 167, 168, 169, 170, 171, 172, 173, 174, 175, 176, 177, 178, 179, 180, 182, 183, 184, 185, 186, 187, 188, 189, 190, 191, 192, 194, 195, 196, 197, 200, 203, 204, 209, 222, 232, 236, 237, 246, 254, 258, 267, 278, 281, 282, 289, 308, 311, 312, 316, 318, 319, 334, 339, 340, 342, 345, 346, 348 and combinations thereof; or,
b) an amino acid sequence having at least 1, 2, 3, 4, 5, 6, 7, 8, 9, 10, 11, 12, 13, 14, 15, 16, 17, 18, 19, 20, 21, 22, 23, 24, 25, 26, 27, 28, 29, 30, 31, 32, 33, 34, 35, 36, 37, 38, 39, 40, 41, 42, 43 or 44 of any of the amino acid modification of (a);

2. The isolated or recombinant polynucleotide of claim 1, wherein said nucleotide sequence encodes a meganuclease polypeptide having at least 80% sequence identity to SEQ ID NO: 1.

3. The isolated or recombinant polynucleotide of claim 1, wherein said at least one amino acid modification comprises;
a) an aspartic acid (D) at a position corresponding to amino acid position 2 in SEQ ID NO: 1;
b) a histidine (H) at a position corresponding to amino acid position 12 in SEQ ID NO: 1;
c) an isoleucine (I) at a position corresponding to amino acid position 16 in SEQ ID NO: 1;
d) a cysteine (C) at a position corresponding to amino acid position 22 in SEQ ID NO: 1;
e) a leucine (L) at a position corresponding to amino acid position 23 in SEQ ID NO: 1;
f) an arginine (R) at a position corresponding to amino acid position 31 in SEQ ID NO: 1;
g) an asparagine (N) at a position corresponding to amino acid position 36 in SEQ ID NO: 1;
h) a leucine (L) at a position corresponding to amino acid position 43 in SEQ ID NO: 1;
i) an arginine (R) or lysine (K) at a position corresponding to amino acid position 50 in SEQ ID NO: 1;
j) a leucine (L) at a position corresponding to amino acid position 56 in SEQ ID NO: 1;
k) an isoleucine (I) at a position corresponding to amino acid position 58 in SEQ ID NO: 1;
l) a histidine (H) or alanine (A) at a position corresponding to amino acid position 59 in SEQ ID NO: 1;
m) a valine (V) at a position corresponding to amino acid position 62 in SEQ ID NO: 1;
n) a lysine (K) at a position corresponding to amino acid position 71 in SEQ ID NO: 1;
o) a threonine (T) at a position corresponding to amino acid position 72 in SEQ ID NO: 1;
p) an alanine (A) at a position corresponding to amino acid position 73 in SEQ ID NO: 1;
q) an arginine (R) at a position corresponding to amino acid position 80 in SEQ ID NO: 1;
r) a lysine (K) at a position corresponding to amino acid position 81 in SEQ ID NO: 1;
s) an arginine (R) at a position corresponding to amino acid position 82 in SEQ ID NO: 1;
t) an aspartic acid (D) at a position corresponding to amino acid position 86 in SEQ ID NO: 1;
u) an isoleucine (I) at a position corresponding to amino acid position 91 in SEQ ID NO: 1;
v) an isoleucine (I) at a position corresponding to amino acid position 95 in SEQ ID NO: 1;
w) an arginine (R) at a position corresponding to amino acid position 98 in SEQ ID NO: 1;
x) a valine (V) at a position corresponding to amino acid position 103 in SEQ ID NO: 1;
y) a serine (S) at a position corresponding to amino acid position 113 in SEQ ID NO: 1;
z) a proline (P) at a position corresponding to amino acid position 114 in SEQ ID NO: 1;
aa) an arginine (R) at a position corresponding to amino acid position 116 in SEQ ID NO: 1;
bb) a glycine (G) at a position corresponding to amino acid position 117 in SEQ ID NO: 1;
cc) a threonine (T) at a position corresponding to amino acid position 118 in SEQ ID NO: 1;
dd) a an glycine (G) at a position corresponding to amino acid position 121 in SEQ ID NO: 1;
ee) an arginine (R) at a position corresponding to amino acid position 124 in SEQ ID NO: 1;
ff) a cysteine (C) at a position corresponding to amino acid position 128 in SEQ ID NO: 1;
gg) an alanine (A) at a position corresponding to amino acid position 129 in SEQ ID NO: 1;
hh) an arginine (R) at a position corresponding to amino acid position 131 in SEQ ID NO: 1;
ii) a serine (S) at a position corresponding to amino acid position 147 in SEQ ID NO: 1;
jj) an alanine (A) at a position corresponding to amino acid position 151 in SEQ ID NO: 1;
kk) a leucine (L) or a methionine (M) at a position corresponding to amino acid position 153 in SEQ ID NO: 1;
ll) a tryptophan (W) at a position corresponding to amino acid position 159 in SEQ ID NO: 1;
mm) a glutamic acid (E) at a position corresponding to amino acid position 160 in SEQ ID NO: 1;
nn) a valine (V) at a position corresponding to amino acid position 161 in SEQ ID NO: 1;
oo) a tyrosine (Y) at a position corresponding to amino acid position 162 in SEQ ID NO: 1;
pp) an arginine (R) at a position corresponding to amino acid position 163 in SEQ ID NO: 1;
qq) a histidine (H) at a position corresponding to amino acid position 164 in SEQ ID NO: 1;
rr) a leucine (L) at a position corresponding to amino acid position 165 in SEQ ID NO: 1;
ss) an arginine (R) at a position corresponding to amino acid position 166 in SEQ ID NO: 1;
tt) a histidine (H) at a position corresponding to amino acid position 167 in SEQ ID NO: 1;
uu) a proline (P) at a position corresponding to amino acid position 168 in SEQ ID NO: 1;
vv) an alanine (A) at a position corresponding to amino acid position 169 in SEQ ID NO: 1;
ww) a proline (P) at a position corresponding to amino acid position 170 in SEQ ID NO: 1;
xx) a histidine (H) at a position corresponding to amino acid position 171 in SEQ ID NO: 1;
yy) a proline (P) at a position corresponding to amino acid position 172 in SEQ ID NO: 1;
zz) an arginine (R) at a position corresponding to amino acid position 173 in SEQ ID NO: 1;
aaa) a leucine (L) at a position corresponding to amino acid position 174 in SEQ ID NO: 1;
bbb) a proline (P) at a position corresponding to amino acid position 175 in SEQ ID NO: 1;
ccc) a glutamine (Q) at a position corresponding to amino acid position 176 in SEQ ID NO: 1;
ddd) an alanine (A) at a position corresponding to amino acid position 177 in SEQ ID NO: 1;
eee) an arginine (R) at a position corresponding to amino acid position 178 in SEQ ID NO: 1;
fff) a valine (V) at a position corresponding to amino acid position 179 in SEQ ID NO: 1;
ggg) a glutamine (Q) at a position corresponding to amino acid position 180 in SEQ ID NO: 1;
hhh) a valine (V) at a position corresponding to amino acid position 182 in SEQ ID NO: 1;
iii) a proline (P) at a position corresponding to amino acid position 183 in SEQ ID NO: 1;
jjj) a lysine (K) at a position corresponding to amino acid position 184 in SEQ ID NO: 1;
kkk) a threonine (T) or a histidine (H) at a position corresponding to amino acid position 185 in SEQ ID NO: 1;
lll) a serine (S) at a position corresponding to amino acid position 186 in SEQ ID NO: 1;
mmm) a glutamic acid (E) at a position corresponding to amino acid position 187 in SEQ ID NO: 1;
nnn) a leucine (L) at a position corresponding to amino acid position 188 in SEQ ID NO: 1;
ooo) a glutamic acid (E) at a position corresponding to amino acid position 189 in SEQ ID NO: 1;
ppp) a glutamine (Q) at a position corresponding to amino acid position 190 in SEQ ID NO: 1;
qqq) a leucine (L) at a position corresponding to amino acid position 191 in SEQ ID NO: 1;
rrr) a proline (P) at a position corresponding to amino acid position 194 in SEQ ID NO: 1;
sss) a lysine (K) at a position corresponding to amino acid position 195 in SEQ ID NO: 1;
ttt) a serine (S) at a position corresponding to amino acid position 196 in SEQ ID NO: 1;
uuu) a phenylalanine (F) at a position corresponding to amino acid position 197 in SEQ ID NO: 1;
vvv) an isoleucine (I) at a position corresponding to amino acid position 200 in SEQ ID NO: 1;
www) a valine (V) at a position corresponding to amino acid position 203 in SEQ ID NO: 1;
xxx) a leucine (L) at a position corresponding to amino acid position 204 in SEQ ID NO: 1;
yyy) a cysteine (C) at a position corresponding to amino acid position 209 in SEQ ID NO: 1;
zzz) a leucine (L) at a position corresponding to amino acid position 222 in SEQ ID NO: 1;
aaaa) an isoleucine (I) at a position corresponding to amino acid position 232 in SEQ ID NO: 1;
bbbb) a serine (S) at a position corresponding to amino acid position 236 in SEQ ID NO: 1;
cccc) a leucine (L) or an arginine (R) at a position corresponding to amino acid position 237 in SEQ ID NO: 1;
dddd) a histidine (H) at a position corresponding to amino acid position 246 in SEQ ID NO: 1;
eeee) an isoleucine (I) at a position corresponding to amino acid position 254 in SEQ ID NO: 1;
ffff) a serine (S) at a position corresponding to amino acid position 258 in SEQ ID NO: 1;
gggg) an arginine (R) at a position corresponding to amino acid position 267 in SEQ ID NO: 1;
hhhh) an isoleucine (I) at a position corresponding to amino acid position 278 in SEQ ID NO: 1;
iiii) a tyrosine (Y) at a position corresponding to amino acid position 281 in SEQ ID NO: 1;
jjjj) a phenylalanine (F) at a position corresponding to amino acid position 282 in SEQ ID NO: 1;
kkkk) a threonine (T) at a position corresponding to amino acid position 289 in SEQ ID NO: 1;
llll) a glycine (G) at a position corresponding to amino acid position 308 in SEQ ID NO: 1;
mmmm) an arginine (R) at a position corresponding to amino acid position 311 in SEQ ID NO: 1;
nnnn) an alanine (A) at a position corresponding to amino acid position 312 in SEQ ID NO: 1;
oooo) an alanine (A) at a position corresponding to amino acid position 316 in SEQ ID NO: 1;
pppp) an arginine (R) at a position corresponding to amino acid position 318 in SEQ ID NO: 1
qqqq) an alanine (A) at a position corresponding to amino acid position 334 in SEQ ID NO: 1;
rrrr) a phenylalanine (F) at a position corresponding to amino acid position 339 in SEQ ID NO: 1;
ssss) a glycine (G) or a leucine (L) at a position corresponding to amino acid position 340 in SEQ ID NO: 1;
tttt) a serine (S) at a position corresponding to amino acid position 342 in SEQ ID NO: 1;
uuuu) an asparagine (N) at a position corresponding to amino acid position 345 in SEQ ID NO: 1;
vvvv) an asparagine (N) at a position corresponding to amino acid position 346 in SEQ ID NO: 1;
wwww) an asparagine (N) at a position corresponding to amino acid position 348 in SEQ ID NO: 1; or,
xxxx) any combination of a) to wwww).

4. The isolated or recombinant polynucleotide of claim 1, wherein said nucleotide sequence encodes a meganuclease polypeptide, wherein said polypeptide further comprises:
a) an aspartic acid (D) at a position corresponding to amino acid position 2 in SEQ ID NO: 1;
b) a histidine (H) at a position corresponding to amino acid position 12 in SEQ ID NO: 1;
c) an isoleucine (I) at a position corresponding to amino acid position 16 in SEQ ID NO: 1;
d) a serine (S) or an alanine (A) at a position corresponding to amino acid position 19 in SEQ ID NO: 1;
e) a cysteine (C) at a position corresponding to amino acid position 22 in SEQ ID NO: 1;
f) a leucine (L) at a position corresponding to amino acid position 23 in SEQ ID NO: 1;
g) a methionine (M) at a position corresponding to amino acid position 24 in SEQ ID NO: 1;
h) an arginine (R) or an alanine (A) at a position corresponding to amino acid position 28 in SEQ ID NO: 1;
i) an arginine (R), alanine (A), glutamine (Q), cysteine (C), glycine (G), serine (S), threonine (T), leucine (L), glutamic acid (E), or a proline (P) at a position corresponding to amino acid position 30 in SEQ ID NO: 1;
j) an arginine (R) at a position corresponding to amino acid position 31 in SEQ ID NO: 1;
k) an arginine (R), alanine (A), lysine (K) glutamine (Q), glycine (G) or a leucine (L) at a position corresponding to amino acid position 32 in SEQ ID NO: 1;
l) an asparagine (N) at a position corresponding to amino acid position 36 in SEQ ID NO: 1;
m) a leucine (L) at a position corresponding to amino acid position 43 in SEQ ID NO: 1;
n) an arginine (R) or lysine (K) at a position corresponding to amino acid position 50 in SEQ ID NO: 1;
o) an isoleucine (I) or a leucine (L) at a position corresponding to amino acid position 54 in SEQ ID NO: 1;
p) a leucine (L) at a position corresponding to amino acid position 56 in SEQ ID NO: 1;
q) a glutamic acid (E) at a position corresponding to amino acid position 57 in SEQ ID NO: 1;
r) an isoleucine (I) at a position corresponding to amino acid position 58 in SEQ ID NO: 1;
s) a histidine (H) or alanine (A) at a position corresponding to amino acid position 59 in SEQ ID NO: 1;
t) a valine (V) at a position corresponding to amino acid position 62 in SEQ ID NO: 1;
u) a lysine (K) at a position corresponding to amino acid position 71 in SEQ ID NO: 1;
v) a threonine (T) at a position corresponding to amino acid position 72 in SEQ ID NO: 1;
w) an alanine (A) at a position corresponding to amino acid position 73 in SEQ ID NO: 1;
x) a glycine (G) at a position corresponding to amino acid position 79 in SEQ ID NO: 1;
y) an arginine (R) at a position corresponding to amino acid position 80 in SEQ ID NO: 1;
z) a lysine (K) at a position corresponding to amino acid position 81 in SEQ ID NO: 1;
aa) an arginine (R) at a position corresponding to amino acid position 82 in SEQ ID NO: 1;
bb) an aspartic acid (D) at a position corresponding to amino acid position 86 in SEQ ID NO: 1;
cc) a leucine (L) at a position corresponding to amino acid position 87 in SEQ ID NO: 1;
dd) an isoleucine (I) at a position corresponding to amino acid position 91 in SEQ ID NO: 1;
ee) an isoleucine (I) at a position corresponding to amino acid position 95 in SEQ ID NO: 1;
ff) an arginine (R) at a position corresponding to amino acid position 98 in SEQ ID NO: 1;
gg) a valine (V) at a position corresponding to amino acid position 103 in SEQ ID NO: 1;
hh) an alanine (A) at a position corresponding to amino acid position 105 in SEQ ID NO: 1;
ii) an arginine (R) at a position corresponding to amino acid position 111 in SEQ ID NO: 1;
jj) a serine (S) at a position corresponding to amino acid position 113 in SEQ ID NO: 1;
kk) a proline (P) at a position corresponding to amino acid position 114 in SEQ ID NO: 1;
ll) an arginine (R) at a position corresponding to amino acid position 116 in SEQ ID NO: 1;
mm) a an glycine (G) at a position corresponding to amino acid position 117 in SEQ ID NO: 1;
nn) a threonine (T) at a position corresponding to amino acid position 118 in SEQ ID NO: 1;
oo) a an glycine (G) at a position corresponding to amino acid position 121 in SEQ ID NO: 1;
pp) an arginine (R) at a position corresponding to amino acid position 124 in SEQ ID NO: 1;
qq) a cysteine (C) at a position corresponding to amino acid position 128 in SEQ ID NO: 1;
rr) an alanine (A) at a position corresponding to amino acid position 129 in SEQ ID NO: 1;
ss) an arginine (R) at a position corresponding to amino acid position 131 in SEQ ID NO: 1;
tt) a valine (V) at a position corresponding to amino acid position 132 in SEQ ID NO: 1;
uu) a serine (S) at a position corresponding to amino acid position 147 in SEQ ID NO: 1;
vv) an alanine (A) at a position corresponding to amino acid position 151 in SEQ ID NO: 1;
ww) a leucine (L) or a methionine (M) at a position corresponding to amino acid position 153 in SEQ ID NO: 1;
xx) a tryptophan (W) at a position corresponding to amino acid position 159 in SEQ ID NO: 1;
yy) a glutamic acid (E) at a position corresponding to amino acid position 160 in SEQ ID NO: 1;
zz) a valine (V) at a position corresponding to amino acid position 161 in SEQ ID NO: 1;
aaa) a tyrosine (Y) at a position corresponding to amino acid position 162 in SEQ ID NO: 1;
bbb) an arginine (R) at a position corresponding to amino acid position 163 in SEQ ID NO: 1;
ccc) a histidine (H) at a position corresponding to amino acid position 164 in SEQ ID NO: 1;
ddd) a leucine (L) at a position corresponding to amino acid position 165 in SEQ ID NO: 1;
eee) an arginine (R) at a position corresponding to amino acid position 166 in SEQ ID NO: 1;
fff) a histidine (H) at a position corresponding to amino acid position 167 in SEQ ID NO: 1;
ggg) a proline (P) at a position corresponding to amino acid position 168 in SEQ ID NO: 1;
hhh) an alanine (A) at a position corresponding to amino acid position 169 in SEQ ID NO: 1;
iii) a proline (P) at a position corresponding to amino acid position 170 in SEQ ID NO: 1;
jjj) a histidine (H) at a position corresponding to amino acid position 171 in SEQ ID NO: 1;
kkk) a proline (P) at a position corresponding to amino acid position 172 in SEQ ID NO: 1;
lll) an arginine (R) at a position corresponding to amino acid position 173 in SEQ ID NO: 1;
mmm) a leucine (L) at a position corresponding to amino acid position 174 in SEQ ID NO: 1;
nnn) a proline (P) at a position corresponding to amino acid position 175 in SEQ ID NO: 1;
ooo) a glutamine (Q) at a position corresponding to amino acid position 176 in SEQ ID NO: 1;
ppp) an alanine (A) at a position corresponding to amino acid position 177 in SEQ ID NO: 1;
qqq) an arginine (R) at a position corresponding to amino acid position 178 in SEQ ID NO: 1;
rrr) a valine (V) at a position corresponding to amino acid position 179 in SEQ ID NO: 1;
sss) a glutamine (Q) at a position corresponding to amino acid position 180 in SEQ ID NO: 1;
ttt) a valine (V) at a position corresponding to amino acid position 182 in SEQ ID NO: 1;
uuu) a proline (P) at a position corresponding to amino acid position 183 in SEQ ID NO: 1;
vvv) a lysine (K) at a position corresponding to amino acid position 184 in SEQ ID NO: 1;
www) a threonine (T) or a histidine (H) at a position corresponding to amino acid position 185 in SEQ ID NO: 1;
xxx) a serine (S) at a position corresponding to amino acid position 186 in SEQ ID NO: 1;
yyy) a glutamic acid (E) at a position corresponding to amino acid position 187 in SEQ ID NO: 1;
zzz) a leucine (L) at a position corresponding to amino acid position 188 in SEQ ID NO: 1;
aaaa) a glutamic acid (E) at a position corresponding to amino acid position 189 in SEQ ID NO: 1;
bbbb) a glutamine (Q) at a position corresponding to amino acid position 190 in SEQ ID NO: 1;
cccc) a leucine (L) at a position corresponding to amino acid position 191 in SEQ ID NO: 1;
dddd) an amino acid deletion at a position corresponding to amino acid position 192 in SEQ ID NO: 1;
eeee) a proline (P) at a position corresponding to amino acid position 194 in SEQ ID NO: 1;
ffff) a lysine (K) at a position corresponding to amino acid position 195 in SEQ ID NO: 1;
gggg) a serine (S) at a position corresponding to amino acid position 196 in SEQ ID NO: 1;
hhhh) a phenylalanine (F) at a position corresponding to amino acid position 197 in SEQ ID NO: 1;
iiii) an isoleucine (I) at a position corresponding to amino acid position 200 in SEQ ID NO: 1;
jjjj) a valine (V) at a position corresponding to amino acid position 203 in SEQ ID NO: 1;
kkkk) a leucine (L) at a position corresponding to amino acid position 204 in SEQ ID NO: 1;
llll) an alanine (A) or a serine (S) at a position corresponding to amino acid position 206 in SEQ ID NO: 1;
mmmm) a cysteine (C) at a position corresponding to amino acid position 209 in SEQ ID NO: 1;
nnnn) a leucine (L) at a position corresponding to amino acid position 222 in SEQ ID NO: 1;
oooo) a methionine (M) at a position corresponding to amino acid position 211 in SEQ ID NO: 1;
pppp) an isoleucine (I) at a position corresponding to amino acid position 232 in SEQ ID NO: 1;
qqqq) a serine (S) at a position corresponding to amino acid position 236 in SEQ ID NO: 1;
rrrr) a leucine (L) or an arginine (R) at a position corresponding to amino acid position 237 in SEQ ID NO: 1;
ssss) an isoleucine (I) or a leucine (L) at a position corresponding to amino acid position 241 in SEQ ID NO: 1;
tttt) a glutamic acid (E) at a position corresponding to amino acid position 244 in SEQ ID NO: 1;
uuuu) a histidine (H) at a position corresponding to amino acid position 246 in SEQ ID NO: 1;
vvvv) an aspartic acid (D) or histidine (H) at a position corresponding to amino acid position 253 in SEQ ID NO: 1;
wwww) an isoleucine (I) at a position corresponding to amino acid position 254 in SEQ ID NO: 1;
xxxx) a serine (S) at a position corresponding to amino acid position 258 in SEQ ID NO: 1;
yyyy) an arginine (R) at a position corresponding to amino acid position 267 in SEQ ID NO: 1;
zzzz) an isoleucine (I) at a position corresponding to amino acid position 278 in SEQ ID NO: 1;
aaaaa) a tyrosine (Y) at a position corresponding to amino acid position 281 in SEQ ID NO: 1;
bbbbb) a phenylalanine (F) at a position corresponding to amino acid position 282 in SEQ ID NO: 1;
ccccc) a threonine (T) at a position corresponding to amino acid position 289 in SEQ ID NO: 1;
ddddd) an alanine (A) at a position corresponding to amino acid position 292 in SEQ ID NO: 1;
eeeee) a glycine (G) at a position corresponding to amino acid position 308 in SEQ ID NO: 1;
fffff) an arginine (R) at a position corresponding to amino acid position 311 in SEQ ID NO: 1;
ggggg) an alanine (A) at a position corresponding to amino acid position 312 in SEQ ID NO: 1;
hhhhh) an alanine (A) at a position corresponding to amino acid position 316 in SEQ ID NO: 1;
iiiii) an arginine (R) at a position corresponding to amino acid position 318 in SEQ ID NO: 1
jjjjj) a valine (V) at a position corresponding to amino acid position 319 in SEQ ID NO: 1;
kkkkk) an alanine (A) at a position corresponding to amino acid position 334 in SEQ ID NO: 1;
lllll) a phenylalanine (F) at a position corresponding to amino acid position 339 in SEQ ID NO: 1;
mmmmm) a glycine (G) or a leucine (L) at a position corresponding to amino acid position 340 in SEQ ID NO: 1;
nnnnn) a serine (S) at a position corresponding to amino acid position 342 in SEQ ID NO: 1;
ooooo) an asparagine (N) at a position corresponding to amino acid position 345 in SEQ ID NO: 1;
ppppp) an asparagine (N) at a position corresponding to amino acid position 346 in SEQ ID NO: 1; or,
qqqqq) an asparagine (N) at a position corresponding to amino acid position 348 in SEQ ID NO: 1; or,
rrrrr) any combination of a) to qqqqq).

5. The isolated or recombinant polynucleotide of claim 1, wherein said nucleotide sequence encodes a meganuclease polypeptide selected from the group consisting of SEQ ID NOs: 14, 15, 16, 17, 18, 19, 20, 21, 22, 23, 24, 25, 26, 27, 28, 29, 30, 31, 32, 33, 34, 35, 36, 37, 38, 87, 88, 89, 90, 91, 92, 93, 94, 95, 96, 97, 98, 99, 100, 101, 102, 103, 104, 105, 106, 107, 108, 109, 110, 111, 112, 113, 114, 115, 116, 117, 118, 119, 120, 121, 122, 123, 124, 125, 126, 127, 128, 129, 130, 131, 132, 133, 134, 135, 136, 137, 138, 139, 140, 141, 142, 143, 144, 145, 146, 147, 148, 149, 150, 151, 152, 153, 154, 155, 156, 157, 158, 159, 160, 161, 162, 163, 164, 165, 166, 167, 251, 252, 253, 272, 273, 274, 275, 272, 273, 274, 275, 284, 285, 286, 287, 288, 289, 290, 291, 292, 293, 294, 295, 296, 297, 298, 330, 331, 332, 333, 334, 335, 336, 337, 338, 339, 340, 341, 357, 358, 359, 360, 361, 362, 363, 364, 365, 366, 367, 368, 369, 370, 371, 390, 391, 392, 393, 394, 395, 396, 397, 398, 399, 400, 401, 402, 403, 430, 431, 432 and 433.

6. The isolated or recombinant polynucleotide of claim 1, wherein said nucleotide sequence encodes a meganuclease polypeptide, wherein the polypeptide is capable of recognizing and cleaving a meganuclease recognition sequence selected from the group consisting of SEQ ID NO: 2, SEQ ID NO: 85, SEQ ID NO:269, SEQ ID NO:281, SEQ ID NO: 331, SEQ ID NO:358, SEQ ID NO:390, SEQ ID NO:423 or SEQ ID NO:424.

7. The isolated or recombinant polynucleotide of claim 1, wherein said nucleotide sequence encodes a meganuclease polypeptide, wherein said polypeptide has an increased meganuclease activity when compared to a control meganuclease that lacks said amino acid modification.

8. The isolated or recombinant polynucleotide of claim 7, wherein said control meganuclease is selected from the group of SEQ ID NO:1, SEQ ID NO: 86, SEQ ID NO: 250, SEQ ID NO:270, SEQ ID NO:271, SEQ ID NO:282, SEQ ID NO:283, SEQ ID NO: 329, SEQ ID NO:356, SEQ ID NO:389, SEQ ID NO:429 or SEQ ID NO:435.

9. The isolated or recombinant polynucleotide of claim 7, wherein the increased meganuclease activity is evidenced by:
a) a higher yeast assay score when compared to the control meganuclease that lacks said amino acid modification; or,
b) a higher target site mutation rate when compared to the control meganuclease that lacks said amino acid modification; or,
c) a higher in-vitro cutting when compared to the control meganuclease that lacks said amino acid modification; or,
d) any combination of (a), (b) and (c).

10. The isolated or recombinant polynucleotide of claim 7, wherein the increased meganuclease activity is determined at 16° C., 24° C., 28° C., 30° C. or 37° C.

11. A recombinant DNA construct, comprising the isolated or recombinant polynucleotide of claim 1.

12. A cell comprising at least one polynucleotide of claim 1 or the recombinant DNA construct of claim 11, wherein said polynucleotide is heterologous to the cell.

13. The cell of claim 12, wherein said cell is a plant cell.

14. The cell of claim 12, wherein said plant cell is from a monocot.

15. The cell of claim 12, wherein said plant cell is from a dicot.

16. A plant comprising a plant cell of claim 13.

17. A transgenic seed produced by the plant of claim 16.

18. A method for producing a meganuclease having increased activity over a range of temperatures, the method comprising:
a) producing a variant meganuclease by modifying at least one amino acid at an amino acid position corresponding to a position of SEQ ID NO:1 selected from the group consisting of positions 2, 12, 16, 22, 23, 31, 36, 43, 50, 56, 58, 59, 62, 71, 72, 73, 80, 81, 82, 86, 91, 95, 98, 103, 113, 114, 116, 117, 118, 121, 124, 128, 129, 131, 147, 151, 153, 159, 160, 161, 162, 163, 164, 165, 166, 167, 168, 169, 170, 171, 172, 173, 174, 175, 176, 177, 178, 179, 180, 182, 183, 184, 185, 186, 187, 188, 189, 190, 191, 192, 194, 195, 196, 197, 200, 203, 204, 209, 222, 232, 236, 237, 246, 254, 258, 267, 278, 281, 282, 289, 308, 311, 312, 316, 318, 319, 334, 339, 340, 342, 345, 346 348 and combinations thereof; and,
b) selecting said variant meganuclease from step a) and screening said variant meganuclease for the ability to cleave a DNA target sequence over a range of temperatures between and including 16° C. to 37° C.

19. The method of claim 39, wherein said range of temperatures comprises:
a) 16° C.;
b) 18° C.;
c) 20° C.;
d) 24° C.;
e) 28° C.;
f) 30° C.;
g) 37° C.; or,
h) any combination of a), b), c), d), e), f), h), g) and g).

20. A method for producing a meganuclease having an increased meganuclease activity when compared to a control meganuclease, the method comprising:
a) producing a variant meganuclease by modifying at least one amino acid at an amino acid position corresponding to a position of SEQ ID NO:1 selected from the group consisting of positions 2, 12, 16, 22, 23, 31, 36, 43, 50, 56, 58, 59, 62, 71, 72, 73, 80, 81, 82, 86, 91, 95, 98, 103, 113, 114, 116, 117, 118, 121, 124, 128, 129, 131, 147, 151, 153, 159, 160, 161, 162, 163, 164, 165, 166, 167, 168, 169, 170, 171, 172, 173, 174, 175, 176, 177, 178, 179, 180, 182, 183, 184, 185, 186, 187, 188, 189, 190, 191, 192, 194, 195, 196, 197, 200, 203, 204, 209, 222, 232, 236, 237, 246, 254, 258, 267, 278, 281, 282, 289, 308, 311, 312, 316, 318, 319, 334, 339, 340, 342, 345, 346, 348 and combinations thereof; and,
b) selecting the variant meganuclease from step a) and screening said variant for increased meganuclease activity when compared to a control meganuclease.

21. The method of claim 41, wherein the increased meganuclease activity is evidenced by:
a) a higher yeast assay score when compared to the control meganuclease that lacks said amino acid modification; or,
b) a higher target site mutation rate when compared to the control meganuclease that lacks said amino acid modification; or,
c) a higher in-vitro cutting when compared to the control meganuclease that lacks said amino acid modification; or,
d) any combination of (a), (b) and (c)

22. A composition comprising at least one or more polynucleotides of claim 1.
